(19) United States
(12) Patent Application Publication
(10) Pub. No.: US 2012/0184447 A1
(43) Pub. Date: Jul. 19, 2012

(54) Methods and Nucleic Acids for Analysis of Bladder Cell Proliferative Disorders

(76) Inventor: Reinhold Wasserkort, Berlin (DE)

(21) Appl. No.: 13/380,774

(22) PCT Filed: Jun. 25, 2010
(86) PCT No.: PCT/EP2010/059092

§ 371 Date: Apr. 10, 2012

(30) Foreign Application Priority Data
Jun. 26, 2009 (EP) 09163934.4

(51) Int. Cl. C12Q 1/68; C40B 20/00; C40B 40/06; G01N 33/574; C07H 21/04

(52) U.S. Cl. 506/2; 435/6.11; 436/501; 435/7.92; 536/24.31; 506/16

(57) ABSTRACT

The invention provides methods, nucleic acids and kits for detecting bladder carcinoma. The invention discloses genomic sequences the methylation patterns of which have utility for the improved detection of said disorder, thereby enabling the improved diagnosis and treatment of patients.

### FIELD OF THE INVENTION

[0001] The present invention relates to genomic DNA sequences that exhibit altered expression patterns in disease states relative to normal. Particular embodiments provide methods, nucleic acids, nucleic acid arrays and kits useful for detecting, or for diagnosing bladder carcinoma.

### BACKGROUND

[0002] CpG island methylation. Aberrant methylation of CpG islands has been shown to lead to the transcriptional silencing of certain genes that have been previously linked to the pathogenesis of various cell proliferative disorders, including bladder carcinoma. CpG islands are sequences which are rich in CpG dinucleotides and can usually be found in the 5′ region of approximately 50% of all human genes. Methylation of the cytosines in these islands leads to the loss of gene expression and has been reported in the inactivation of the X chromosome and genomic imprinting.

[0003] Development of medical tests. Two key evaluative measures of any medical screening or diagnostic test are its sensitivity and specificity, which measure how well the test performs to accurately detect all affected individuals without exception, and without falsely including individuals who do not have the target disease (predicitive value). Historically, many diagnostic tests have been criticized due to poor sensitivity and specificity.

[0004] A true positive (TP) result is where the test is positive and the condition is present. A false positive (FP) result is where the test is positive but the condition is not present. A true negative (TN) result is where the test is negative and the condition is not present. A false negative (FN) result is where the test is negative but the condition is not present. In this context: Sensitivity=TP/(TP+FN); Specificity=TN/(FP+TN); and Predictive value=TP/(TP+FP).

[0005] Sensitivity is a measure of a test's ability to correctly detect the target disease in an individual being tested. A test having poor sensitivity produces a high rate of false negatives, i.e., individuals who have the disease but are falsely identified as being free of that particular disease. The potential danger of a false negative is that the diseased individual will remain undiagnosed and untreated for some period of time, during which the disease may progress to a later stage wherein treatments, if any, may be less effective. An example of a test that has low sensitivity is a protein-based blood test for HIV. This type of test exhibits poor sensitivity because it fails to detect the presence of the virus until the disease is well established and the virus has invaded the bloodstream in substantial numbers. In contrast, an example of a test that has high sensitivity is viral-load detection using the polymerase chain reaction (PCR). High sensitivity is achieved because this type of test can detect very small quantities of the virus. High sensitivity is particularly important when the consequences of missing a diagnosis are high.

[0006] Specificity, on the other hand, is a measure of a test's ability to identify accurately patients who are free of the disease state. A test having poor specificity produces a high rate of false positives, i.e., individuals who are falsely identified as having the disease. A drawback of false positives is that they force patients to undergo unnecessary medical procedures treatments with their attendant risks, emotional and financial stresses, and which could have adverse effects on the patient's health. A feature of diseases which makes it difficult to develop diagnostic tests with high specificity is that disease mechanisms, particularly in cell proliferative disorders, often involve a plurality of genes and proteins. Additionally, certain proteins may be elevated for reasons unrelated to a disease state. Specificity is important when the cost or risk associated with further diagnostic procedures or further medical intervention are very high.

### SUMMARY OF THE INVENTION

[0007] The present invention provides a method for detecting bladder carcinoma, in a subject comprising determining the expression levels of at least one gene or genomic sequence selected from the group consisting of AC051635.7, PRDM14, DMRT2, CYP1B1 and SOX1 and regulatory sequences thereof in a biological sample isolated from said subject wherein hypermethylation and for under-expression is indicative of the presence of said disorder. Various aspects of the present invention provide an efficient and unique genetic marker, whereby expression analysis of said marker enables the detection of bladder carcinoma with a particularly high sensitivity, specificity and/or predictive value.

[0008] The present invention also provides a method for detecting bladder carcinoma comprising determining the methylation status and/or the expression level of at least one gene or genomic sequence, selected from the group consisting of AC051635.7, PRDM14, DMRT2, CYP1B1 and SOX1 and regulatory sequences thereof in a biological sample isolated from a subject, wherein hyper-methylation and/or under-expression is indicative of the presence of said disorder.

[0009] In one embodiment the invention provides a method for detecting bladder carcinoma, in a subject comprising determining the expression levels of at least one gene or genomic sequence selected from the group consisting of AC051635.7, PRDM14, DMRT2, CYP1B1 and SOX1 and regulatory sequences thereof in a biological sample isolated from said subject wherein under-expression and/or CpG methylation is indicative of the presence of said disorder. In one embodiment said expression level is determined by detecting the presence, absence or level of mRNA transcribed from said gene. In a further embodiment said expression level is determined by detecting the presence, absence or level of a polypeptide encoded by said gene or sequence thereof.

[0010] In a further preferred embodiment said expression is determined by detecting the presence or absence of CpG methylation within said gene, wherein under-expression indicates the presence of bladder carcinoma.

[0011] Said method comprises the following steps: i) contacting genomic DNA isolated from a biological sample (preferably selected from the group consisting of bladder tissue samples, histological slides, tissue embedded in paraffin, body fluids like blood plasma or serum, cell lines, urine specimen) obtained from the subject with at least one reagent, or series of reagents that distinguishes between methylated and non-methylated CpG dinucleotides within at least one target region of the genomic DNA, wherein the nucleotide sequence of said target region comprises at least one CpG dinucleotide sequence of at least one gene or genomic sequence selected from the group consisting of AC051635.7, PRDM14, DMRT2, CYP1B1 and SOX1 and regulatory sequences thereof and ii) detecting bladder carcinoma, at least in part. Preferably the target region comprises, or hybridizes under stringent conditions to a sequence of at least 16 contiguous nucleotides of at least one genomic sequence, selected from a group comprising SEQ ID NO: 7, 1, 4, 10 and 13; preferably from SEQ ID NO: 8, 2, 5, 11, 14 and most preferably from SEQ ID NO: 9, 3, 6, 12, 15.

[0012] Said use of the gene may be enabled by means of any analysis of the expression of the gene, by means of mRNA expression analysis or protein expression analysis. However, in the most preferred embodiment of the invention the detection of bladder carcinoma, is enabled by means of analysis of the methylation status of at least one gene or genomic sequence selected from the group consisting of AC051635.7, PRDM14, DMRT2, CYP1B1 and SOX1 and promoter or regulatory elements thereof.

[0013] The invention provides a method for the analysis of biological samples for features associated with the development of bladder carcinoma, the method characterized in that the nucleic acid, or a fragment thereof, selected from a group comprising SEQ ID NO: 7, 1, 4, 10 and 13; preferably from SEQ ID NO: 8, 2, 5, 11, 14 and most preferably from SEQ ID NO: 9, 3, 6, 12, 15 is contacted with a reagent or series of reagents capable of distinguishing between methylated and non methylated CpG dinucleotides within the genomic sequence.

[0014] The present invention provides a method for ascertaining epigenetic parameters of genomic DNA associated with the development of bladder carcinoma. The method has utility for the improved detection and diagnosis of said disease.

[0015] Preferably, the source of the test sample is selected from the group consisting of bladder tissue samples, histological slides, tissue embedded in paraffin, body fluids like blood plasma or serum, cell lines, urine specimen and combinations thereof.

[0016] Specifically, the present invention provides a method for detecting bladder carcinoma suitable for use in a diagnostic tool, comprising: obtaining a biological sample comprising genomic nucleic acid(s); contacting the nucleic acid(s), or a fragment thereof, with a reagent or a plurality of reagents sufficient for distinguishing between methylated and non methylated CpG dinucleotide sequences within a target sequence of the subject nucleic acid, wherein the target sequence comprises, or hybridises under stringent conditions to, a sequence comprising at least 16 contiguous nucleotides of at least one genomic sequence, selected from a group comprising SEQ ID NO: 7, 1, 4, 10 and 13; preferably from SEQ ID NO: 8, 2, 5, 11, 14 and most preferably from SEQ ID NO: 9, 3, 6, 12, 15, said contiguous nucleotides comprising at least one CpG dinucleotide sequence; and determining, based at least in part on said distinguishing, the methylation state of at least one target CpG dinucleotide sequence, or an average, or a value reflecting an average methylation state of a plurality of target CpG dinucleotide sequences.

[0017] Preferably, distinguishing between methylated and non methylated CpG dinucleotide sequences within the target sequence comprises methylation state-dependent conversion or nonconversion of at least one such CpG dinucleotide sequence to the corresponding converted or non-converted dinucleotide sequence within a sequence selected from the group consisting of SEQ ID NO: 28, 29, 30, 31, 32, 33, 58, 59, 60, 61, 62, 63, 16, 17, 18, 19, 20, 21, 22, 23, 24, 25, 26, 27, 34, 35, 36, 37, 38, 39, 40, 41, 42, 43, 44, 45, 46, 47, 48, 49, 50, 51, 52, 53, 54, 55, 56, 57, 64, 65, 66, 67, 68, 69, 70, 71, 72, 73, 74, 75 and contiguous regions thereof corresponding to the target sequence. The nucleotide sequences which correspond to the individual sequence ID NOS are summarized by tables 1, 2 and 3.

[0018] It is particularly preferred that at least parts of the nucleotide sequences according to the invention are utilised for at least one of: detection of; detection and differentiation between or among subclasses of; diagnosis of; prognosis of; treatment of; monitoring of; treatment and monitoring of; monitoring the treatment of; predicting the outcome of treatment of; and stage differentiation of bladder carcinoma.

[0019] Additional embodiments provide a method for the detection of bladder carcinoma comprising: obtaining a biological sample having subject genomic DNA; extracting the genomic DNA; treating the genomic DNA, or a fragment thereof, with one or more reagents to convert 5-position unmethylated cytosine bases to uracil or to another base that is detectably dissimilar to cytosine in terms of hybridization properties; contacting the treated genomic DNA, or the treated fragment thereof, with an amplification enzyme and at least two primers comprising, in each case a contiguous sequence at least 9 nucleotides in length that is complementary to, or hybridizes under moderately stringent or stringent conditions to a sequence selected from the group consisting of SEQ ID NO: 28, 29, 30, 31, 32, 33, 58, 59, 60, 61, 62, 63, 16, 17, 18, 19, 20, 21, 22, 23, 24, 25, 26, 27, 34, 35, 36, 37, 38, 39, 40, 41, 42, 43, 44, 45, 46, 47, 48, 49, 50, 51, 52, 53, 54, 55, 56, 57, 64, 65, 66, 67, 68, 69, 70, 71, 72, 73, 74, 75, and complements thereof, wherein the treated DNA or the fragment thereof is either amplified to produce an amplificate, or is not amplified; and determining, based on a presence or absence of, or on a property of said amplificate, the methylation state or an average, or a value reflecting an average of the methylation level of at least one, but more preferably a plurality of CpG dinucleotides of at least one genomic sequence, selected from a group comprising SEQ ID NO: 7, 1, 4, 10 and 13; preferably from SEQ ID NO: 8, 2, 5, 11, 14 and most preferably from SEQ ID NO: 9, 3, 6, 12, 15. Preferably, determining comprises use of at least one method selected from the group consisting of: i) hybridizing at least one nucleic acid molecule comprising a contiguous sequence at least 9 nucleotides in length that is complementary to, or hybridizes under moderately stringent or stringent conditions to a sequence selected from the group consisting of SEQ ID NO: 28, 29, 30, 31, 32, 33, 58, 59, 60, 61, 62, 63, 16, 17, 18, 19, 20, 21, 22, 23, 24, 25, 26, 27, 34, 35, 36, 37, 38, 39, 40, 41, 42, 43, 44, 45, 46, 47, 48, 49, 50, 51, 52, 53, 54, 55, 56, 57, 64, 65, 66, 67, 68, 69, 70, 71, 72, 73, 74, 75, and complements thereof; ii) hybridizing at least one nucleic acid molecule, bound to a solid phase, comprising a contiguous sequence at least 9 nucleotides in length that is complementary to, or hybridizes under moderately stringent or stringent conditions to a sequence selected from the group consisting of SEQ ID NO: 28, 29, 30, 31, 32, 33, 58, 59, 60, 61, 62, 63, 16, 17, 18, 19, 20, 21, 22, 23, 24, 25, 26, 27, 34, 35, 36, 37, 38, 39, 40, 41, 42, 43, 44, 45, 46, 47, 48, 49, 50, 51, 52, 53, 54, 55, 56, 57, 64, 65, 66, 67, 68, 69, 70, 71, 72, 73, 74, 75, and complements thereof; iii) hybridizing at least one nucleic acid molecule comprising a contiguous sequence at least 9 nucleotides in length that is complementary to, or hybridizes under moderately stringent or stringent conditions to a sequence selected from the group consisting of SEQ ID NO: 28, 29, 30, 31, 32, 33, 58, 59, 60, 61, 62, 63, 16, 17, 18, 19, 20, 21, 22, 23, 24, 25, 26, 27, 34, 35, 36, 37, 38, 39, 40, 41, 42, 43, 44, 45, 46, 47, 48, 49, 50, 51, 52, 53, 54, 55, 56, 57, 64, 65, 66, 67, 68, 69, 70, 71, 72, 73, 74, 75, and complements thereof, and extending at least one such hybridized nucleic acid molecule by at least one nucleotide base; and iv) sequencing of the amplificate.

[0020] Further embodiments provide a method for the analysis (i.e. detection or diagnosis) of bladder carcinoma, comprising: obtaining a biological sample having subject genomic DNA; extracting the genomic DNA; contacting the genomic DNA, or a fragment thereof, comprising one or more sequences selected from the group comprising SEQ ID NO: 7, 1, 4, 10 and 13; preferably from SEQ ID NO: 8, 2, 5, 11, 14 and most preferably from SEQ ID NO: 9, 3, 6, 12, 15 or a sequence that hybridizes under stringent conditions thereto, with one or more methylation-sensitive restriction enzymes, wherein the genomic DNA is either digested thereby to produce digestion fragments, or is not digested thereby; and determining, based on a presence or absence of, or on property of at least one such fragment, the methylation state of at least one CpG dinucleotide sequence of at least one genomic sequence, selected from a group comprising SEQ ID NO: 7, 1, 4, 10 and 13; preferably from SEQ ID NO: 8, 2, 5, 11, 14 and most preferably from SEQ ID NO: 9, 3, 6, 12, 15 or an average, or a value reflecting an average methylation state of a plurality of CpG dinucleotide sequences thereof. Preferably, the digested or undigested genomic DNA is amplified prior to said determining.

[0021] Additional embodiments provide novel genomic and chemically modified nucleic acid sequences, as well as oligonucleotides and/or PNA-oligomers for analysis of cytosine methylation patterns within at least one genomic sequence, selected from a group comprising SEQ ID NO: 7, 1, 4, 10 and 13; preferably from SEQ ID NO: 8, 2, 5, 11, 14 and most preferably from SEQ ID NO: 9, 3, 6, 12, 15.

### DETAILED DESCRIPTION OF THE INVENTION

### Definitions:

[0022] The term “Observed/Expected Ratio” (“O/E Ratio”) refers to the frequency of CpG dinucleotides within a particular DNA sequence, and corresponds to the [number of CpG sites/(number of C bases×number of G bases)]/band length for each fragment.

[0023] The term “CpG island” refers to a contiguous region of genomic DNA that satisfies the criteria of (1) having a frequency of CpG dinucleotides corresponding to an “Observed/Expected Ratio” >0.6, and (2) having a “GC Content” >0.5. CpG islands are typically, but not always, between about 0.2 to about 1 KB, or to about 2 kb in length.

[0024] The term “methylation state” or “methylation status” refers to the presence or absence of 5-methylcytosine (“5-mCyt”) at one or a plurality of CpG dinucleotides within a DNA sequence. Methylation states at one or more particular CpG methylation sites (each having two CpG dinucleotide sequences) within a DNA sequence include “unmethylated,” “fully-methylated” and “hemi-methylated.”

[0025] The term “hemi-methylation” or “hemimethylation” refers to the methylation state of a double stranded DNA wherein only one strand thereof is methylated.

[0026] The term ‘AUC’ as used herein is an abbreviation for the area under a curve. In particular it refers to the area under a Receiver Operating Characteristic (ROC) curve. The ROC curve is a plot of the true positive rate against the false positive rate for the different possible cut points of a diagnostic test. It shows the trade-off between sensitivity and specificity depending on the selected cut point (any increase in sensitivity will be accompanied by a decrease in specificity). The area under an ROC curve (AUC) is a measure for the accuracy of a diagnostic test (the larger the area the better, optimum is 1, a random test would have a ROC curve lying on the diagonal with an area of 0.5; for reference: J. P. Egan. Signal Detection Theory and ROC Analysis, Academic Press, New York, 1975).

[0027] The term “microarray” refers broadly to both “DNA microarrays,” and ‘DNA chip(s),’ as recognized in the art, encompasses all art-recognized solid supports, and encompasses all methods for affixing nucleic acid molecules thereto or synthesis of nucleic acids thereon.

[0028] “Genetic parameters” are mutations and polymorphisms of genes and sequences further required for their regulation. To be designated as mutations are, in particular, insertions, deletions, point mutations, inversions and polymorphisms and, particularly preferred, SNPs (single nucleotide polymorphisms).

[0029] “Epigenetic parameters” are, in particular, cytosine methylation. Further epigenetic parameters include, for example, the acetylation of histones which, however, cannot be directly analysed using the described method but which, in turn, correlate with the DNA methylation.

[0030] The term “bisulfite reagent” refers to a reagent comprising bisulfite, disulfite, hydrogen sulfite or combinations thereof, useful as disclosed herein to distinguish between methylated and unmethylated CpG dinucleotide sequences.

[0031] The term “Methylation assay” refers to any assay for determining the methylation state of one or more CpG dinucleotide sequences within a sequence of DNA.

[0032] The term “MS.AP-PCR” (Methylation-Sensitive Arbitrarily-Primed Polymerase Chain Reaction) refers to the art-recognized technology that allows for a global scan of the genome using CG-rich primers to focus on the regions most likely to contain CpG dinucleotides, and described by Gonzalgo et al., Cancer Research 57:594-599, 1997.

[0033] The term “MethyLight™” refers to the art-recognized fluorescence-based real-time PCR technique described by Eads et al., Cancer Res. 59:2302-2306, 1999.

[0034] The term “HeavyMethyl™” assay, in the embodiment thereof implemented herein, refers to an assay, wherein methylation specific blocking probes (also referred to herein as blockers) covering CpG positions between, or covered by the amplification primers enable methylation-specific selective amplification of a nucleic acid sample.

[0035] The term “HeavyMethyl™ MethyLight™” assay, in the embodiment thereof implemented herein, refers to a HeavyMethyl™ MethyLight™ assay, which is a variation of the MethyLight™ assay, wherein the MethyLight™ assay is combined with methylation specific blocking probes covering CpG positions between the amplification primers.

[0036] The term “Ms-SNuPE” (Methylation-sensitive Single Nucleotide Primer Extension) refers to the art-recognized assay described by Gonzalgo & Jones, Nucleic Acids Res. 25:2529-2531, 1997.

[0037] The term “MSP” (Methylation-specific PCR) refers to the art-recognized methylation assay described by Herman et al. Proc. Natl. Acad. Sci. USA 93:9821-9826, 1996, and by U.S. Pat. No. 5,786,146.

[0038] The term “COBRA” (Combined Bisulfite Restriction Analysis) refers to the art-recognized methylation assay described by Xiong & Laird, Nucleic Acids Res. 25:2532-2534, 1997.

[0039] The term “MCA” (Methylated CpG Island Amplification) refers to the methylation assay described by Toyota et al., Cancer Res. 59:2307-12, 1999, and in WO 00/26401A1.

[0040] The term “hybridisation” is to be understood as a bond of an oligonucleotide to a complementary sequence along the lines of the Watson-Crick base pairings in the sample DNA, forming a duplex structure.

[0041] “Stringent hybridisation conditions,” as defined herein, involve hybridising at 68° C. in 5×SSC/5× Denhardt's solution/1.0% SDS, and washing in 0.2×SSC/0.1%/0.1% SDS at room temperature, or involve the art-recognized equivalent thereof (e.g., conditions in which a hybridisation is carried out at 60° C. in 2.5×SSC buffer, followed by several washing steps at 37° C. in a low buffer concentration, and remains stable). Moderately stringent conditions, as defined herein, involve including washing in 3×SSC at 42° C., or the art-recognized equivalent thereof. The parameters of salt concentration and temperature can be varied to achieve the optimal level of identity between the probe and the target nucleic acid. Guidance regarding such conditions is available in the art, for example, by Sambrook et al., 1989, Molecular Cloning, A Laboratory Manual, Cold Spring Harbor Press, N.Y.; and Ausubel et al. (eds.), 1995, Current Protocols in Molecular Biology, (John Wiley & Sons, N.Y.) at Unit 2.10.

[0042] The terms “Methylation-specific restriction enzymes” or “methylation-sensitive restriction enzymes” shall be taken to mean an enzyme that selectively digests a nucleic acid dependant on the methylation state of its recognition site. In the case of such restriction enzymes which specifically cut if the recognition site is not methylated or hemimethylated, the cut will not take place, or with a significantly reduced efficiency, if the recognition site is methylated. In the case of such restriction enzymes which specifically cut if the recognition site is methylated, the cut will not take place, or with a significantly reduced efficiency if the recognition site is not methylated. Preferred are methylation-specific restriction enzymes, the recognition sequence of which contains a CG dinucleotide (for instance cgcg or cccggg). Further preferred for some embodiments are restriction enzymes that do not cut if the cytosine in this dinucleotide is methylated at the carbon atom C5.

[0043] “Non-methylation-specific restriction enzymes” or “non-methylation-sensitive restriction enzymes” are restriction enzymes that cut a nucleic acid sequence irrespective of the methylation state with nearly identical efficiency. They are also called “methylation-unspecific restriction enzymes.”

[0044] In reference to composite array sequences, the phrase “contiguous nucleotides” refers to a contiguous sequence region of any individual contiguous sequence of the composite array, but does not include a region of the composite array sequence that includes a “node,” as defined herein above.

[0045] The term “at least one gene or genomic sequence selected from the group consisting of AC051635.7, PRDM14, DMRT2, CYP1B1 and SOX1 and regulatory sequences thereof” shall be taken to include all transcript variants thereof and all promoter and regulatory elements thereof. Furthermore as a plurality of SNPs are known within said gene the term shall be taken to include all sequence variants thereof.

[0046] Overview:

[0047] The present invention provides a method for detecting bladder carcinoma in a subject comprising determining the expression levels of at least one gene or genomic sequence selected from the group consisting of AC051635.7, PRDM14, DMRT2, CYP1B1 and SOX1 and regulatory sequences thereof in a biological sample isolated from said subject wherein hyper-methylation and for under-expression is indicative of the presence of said disorder. Said markers may be used for the diagnosis of bladder carcinoma.

[0048] PRDM14 encodes for a transcription factor that is presumably involved in epigenetic gene expression control in embryonic stem cells by exerting a histone methyltransferase activity. DMRT2 also encodes for a transcription factor which is involved in processes of cellular development and expressed in a number of organs, including the urinary system. The gene product of CYP1 B1 belongs to the cytochrome p450 super family of monooxygenases and serves as a source of retinoic acid during embryonic and early postnatal development. SOX1 encodes for a transcription factor that is involved in multiple pathways which regulate the differentiation and cell fate determination of neuronal cells. On a molecular level, SOX1 acts by binding to the promoter of HES1, thereby inhibiting HES1 transcription and subsequently attenuating Notch signaling. The sequence of AC051635.7 corresponds with its entry within the Ensembl data base (www.ensembl.org). As used herein, the term AC051635.7 is synonymous with the SEQ ID NO: 96. However, the biological function of AC051635.7 and its gene product is unknown so far.

[0049] In addition to the embodiments above wherein the methylation analysis of at least one gene or genomic sequence selected from the group consisting of AC051635.7, PRDM14, DMRT2, CYP1 B1 and SOX1 and regulatory sequences thereof is analysed, the invention presents further panels of genes comprising at least one gene or genomic sequence selected from the group consisting of AC051635.7, PRDM14, DMRT2, CYP1B1 and SOX1 and regulatory sequences thereof with novel utility for the detection of bladder carcinoma.

[0050] Bisulfite modification of DNA is an art-recognized tool used to assess CpG methylation status. The most frequently used method for analyzing DNA for the presence of 5-methylcytosine is based upon the reaction of bisulfite with cytosine whereby, upon subsequent alkaline hydrolysis, cytosine is converted to uracil which corresponds to thymine in its base pairing behavior. Significantly, however, 5-methylcytosine remains unmodified under these conditions. Consequently, the original DNA is converted in such a manner that methylcytosine, which originally could not be distinguished from cytosine by its hybridization behavior, can now be detected as the only remaining cytosine using standard, art-recognized molecular biological techniques, for example, by amplification and hybridization, or by sequencing. All of these techniques are based on differential base pairing properties, which can now be fully exploited.

[0051] An overview of art-recognized methods for detecting 5-methylcytosine is provided by Rein, T., et al., Nucleic Acids Res., 26:2255, 1998.

[0052] The bisulfite technique, barring few exceptions (e.g., Zeschnigk M, et al., Eur J Hum Genet. 5:94-98, 1997), is currently only used in research. In general, short, specific fragments of a known gene are amplified subsequent to a bisulfite treatment, and either completely sequenced (Olek & Walter, Nat Genet. 1997 17:275-6, 1997), subjected to one or more primer extension reactions (Gonzalgo & Jones, Nucleic Acids Res., 25:2529-31, 1997; WO 95/00669; U.S. Pat. No. 6,251,594) to analyse individual cytosine positions, or treated by enzymatic digestion (Xiong & Laird, Nucleic Acids Res., 25:2532-4, 1997). Detection by hybridisation has also been described in the art (Olek et al., WO 99/28498). Additionally, use of the bisulfite technique for methylation detection with respect to individual genes has been described (Grigg & Clark, Bioessays, 16:431-6, 1994; Zeschnigk M, et al., Hum Mol Genet., 6:387-95, 1997; Feil R, et al., Nucleic Acids Res., 22:695-, 1994; Martin V, et al., Gene, 157:261-4, 1995; WO 9746705 and WO 9515373).

[0053] The present invention provides for the use of the bisulfite technique, in combination with one or more methylation assays, for determination of the methylation status of CpG dinucleotide sequences within at least one genomic sequence, selected from a group comprising SEQ ID NO: 7, 1, 4, 10 and 13; preferably from SEQ ID NO: 8, 2, 5, 11, 14 and most preferably from SEQ ID NO: 9, 3, 6, 12, 15. Genomic CpG dinucleotides can be methylated or unmethylated (alternatively known as up- and down-methylated respectively). However the methods of the present invention are suitable for the analysis of biological samples of a heterogeneous nature e.g. a low concentration of tumor cells within a background of blood or ejaculate. Accordingly, when analyzing the methylation status of a CpG position within such a sample the person skilled in the art may use a quantitative assay for determining the level (e.g. percent, fraction, ratio, proportion or degree) of methylation at a particular CpG position as opposed to a methylation state. Accordingly the term methylation status or methylation state should also be taken to mean a value reflecting the degree of methylation at a CpG position. Unless specifically stated the terms “hypermethylated” or “upmethylated” shall be taken to mean a methylation level above that of a specified cut-off point, wherein said cut-off may be a value representing the average or median methylation level for a given population, or is preferably an optimized cut-off level. The “cut-off” is also referred herein as a “threshold”. In the context of the present invention the terms “methylated”, “hypermethylated” or “upmethylated” shall be taken to include a methylation level above the cut-off be zero (0)% (or equivalents thereof) methylation for all CpG positions within and associated with (e.g. in promoter or regulatory regions) at least one gene or genomic sequence selected from the group consisting of AC051635.7, PRDM14, DMRT2, CYP1B1 and SOX1 and regulatory sequences thereof.

[0054] According to the present invention, determination of the methylation status of CpG dinucleotide sequences within at least one genomic sequence, selected from a group comprising SEQ ID NO: 7, 1, 4, 10 and 13; preferably from SEQ ID NO: 8, 2, 5, 11, 14 and most preferably from SEQ ID NO: 9, 3, 6, 12, 15 has utility in the diagnosis and detection of bladder carcinoma.

[0055] Methylation Assay Procedures. Various methylation assay procedures are known in the art, and can be used in conjunction with the present invention. These assays allow for determination of the methylation state of one or a plurality of CpG dinucleotides (e.g., CpG islands) within a DNA sequence. Such assays involve, among other techniques, DNA sequencing of bisulfite-treated DNA, PCR (for sequence-specific amplification), Southern blot analysis, and use of methylation-sensitive restriction enzymes.

[0056] For example, genomic sequencing has been simplified for analysis of DNA methylation patterns and 5-methylcytosine distribution by using bisulfite treatment (Frommer et al., Proc. Natl. Acad. Sci. USA 89:1827-1831, 1992). Additionally, restriction enzyme digestion of PCR products amplified from bisulfite-converted DNA is used, e.g., the method described by Sadri & Hornsby (Nucl. Acids Res. 24:5058-5059, 1996), or COBRA (Combined Bisulfite Restriction Analysis) (Xiong & Laird, Nucleic Acids Res. 25:2532-2534, 1997).

[0057] COBRA. COBRA™ analysis is a quantitative methylation assay useful for determining DNA methylation levels at specific gene loci in small amounts of genomic DNA (Xiong & Laird, Nucleic Acids Res. 25:2532-2534, 1997). Briefly, restriction enzyme digestion is used to reveal methylation-dependent sequence differences in PCR products of sodium bisulfite-treated DNA. Methylation-dependent sequence differences are first introduced into the genomic DNA by standard bisulfite treatment according to the procedure described by Frommer et al. (Proc. Natl. Acad. Sci. USA 89:1827-1831, 1992). PCR amplification of the bisulfite converted DNA is then performed using primers specific for the CpG islands of interest, followed by restriction endonuclease digestion, gel electrophoresis, and detection using specific, labeled hybridization probes. Methylation levels in the original DNA sample are represented by the relative amounts of digested and undigested PCR product in a linearly quantitative fashion across a wide spectrum of DNA methylation levels. In addition, this technique can be reliably applied to DNA obtained from microdissected paraffin-embedded tissue samples.

[0058] Typical reagents (e.g., as might be found in a typical COBRA™-based kit) for COBRA™ analysis may include, but are not limited to: PCR primers for specific gene (or bisulfite treated DNA sequence or CpG island); restriction enzyme and appropriate buffer; gene-hybridization oligonucleotide; control hybridization oligonucleotide; kinase labeling kit for oligonucleotide probe; and labeled nucleotides. Additionally, bisulfite conversion reagents may include: DNA denaturation buffer; sulfonation buffer; DNA recovery reagents or kits (e.g., precipitation, ultrafiltration, affinity column); desulfonation buffer; and DNA recovery components.

[0059] Preferably, assays such as “MethyLight™” (a fluorescence-based real-time PCR technique) (Eads et al., Cancer Res. 59:2302-2306, 1999), Ms-SNuPE™ (Methylation-sensitive Single Nucleotide Primer Extension) reactions (Gonzalgo & Jones, Nucleic Acids Res. 25:2529-2531, 1997), methylation-specific PCR (“MSP”; Herman et al., Proc. Natl. Acad. Sci. USA 93:9821-9826, 1996; U.S. Pat. No. 5,786,146), and methylated CpG island amplification (“MCA”; Toyota et al., Cancer Res. 59:2307-12, 1999) are used alone or in combination with other of these methods.

[0060] The “HeavyMethyl™” assay, technique is a quantitative method for assessing methylation differences based on methylation specific amplification of bisulfite treated DNA. Methylation specific blocking probes (also referred to herein as blockers) covering CpG positions between, or covered by the amplification primers enable methylation-specific selective amplification of a nucleic acid sample.

[0061] The term “HeavyMethyl™ MethyLight™” assay, in the embodiment thereof implemented herein, refers to a HeavyMethyl™ MethyLight™ assay, which is a variation of the MethyLight™ assay, wherein the MethyLight™ assay is combined with methylation specific blocking probes covering CpG positions between the amplification primers. The HeavyMethyl™ assay may also be used in combination with methylation specific amplification primers.

[0062] Typical reagents (e.g., as might be found in a typical MethyLight□-based kit) for HeavyMethyl™ analysis may include, but are not limited to: PCR primers for specific genes (or bisulfite treated DNA sequence or CpG island); blocking oligonucleotides; optimized PCR buffers and deoxynucleotides; and Taq polymerase.

[0063] MSP. MSP (methylation-specific PCR) allows for assessing the methylation status of virtually any group of CpG sites within a CpG island, independent of the use of methylation-sensitive restriction enzymes (Herman et al. Proc. Natl. Acad. Sci. USA 93:9821-9826, 1996; U.S. Pat. No. 5,786,146). Briefly, DNA is modified by sodium bisulfite converting all unmethylated, but not methylated cytosines to uracil, and subsequently amplified with primers specific for methylated versus unmethylated DNA. MSP requires only small quantities of DNA, is sensitive to 0.1% methylated alleles of a given CpG island locus, and can be performed on DNA extracted from paraffin-embedded samples. Typical reagents (e.g., as might be found in a typical MSP-based kit) for MSP analysis may include, but are not limited to: methylated and unmethylated PCR primers for specific gene (or bisulfite treated DNA sequence or CpG island), optimized PCR buffers and deoxynucleotides, and specific probes.

[0064] MethyLight™. The MethyLight™ assay is a high-throughput quantitative methylation assay that utilizes fluorescence-based real-time PCR (TaqMan□) technology that requires no further manipulations after the PCR step (Eads et al., Cancer Res. 59:2302-2306, 1999). Briefly, the MethyLight™ process begins with a mixed sample of genomic DNA that is converted, in a sodium bisulfite reaction, to a mixed pool of methylation-dependent sequence differences according to standard procedures (the bisulfite process converts unmethylated cytosine residues to uracil). Fluorescence-based PCR is then performed in a “biased” (with PCR primers that overlap known CpG dinucleotides) reaction. Sequence discrimination can occur both at the level of the amplification process and at the level of the fluorescence detection process.

[0065] The MethyLight™ assay may be used as a quantitative test for methylation patterns in the genomic DNA sample, wherein sequence discrimination occurs at the level of probe hybridization. In this quantitative version, the PCR reaction provides for a methylation specific amplification in the presence of a fluorescent probe that overlaps a particular putative methylation site. An unbiased control for the amount of input DNA is provided by a reaction in which neither the primers, nor the probe overlie any CpG dinucleotides. Alternatively, a qualitative test for genomic methylation is achieved by probing of the biased PCR pool with either control oligonucleotides that do not “cover” known methylation sites (a fluorescence-based version of the HeavyMethyl™ and MSP techniques), or with oligonucleotides covering potential methylation sites.

[0066] The MethyLight™ process can by used with any suitable probes e.g. “TaqMan®”, Lightcycler® etc. . . . For example, double-stranded genomic DNA is treated with sodium bisulfite and subjected to one of two sets of PCR reactions using Taq Man® probes; e.g., with MSP primers and/or HeavyMethyl blocker oligonucleotides and TaqMan® probe. The TaqMan® probe is dual-labeled with fluorescent “reporter” and “quencher” molecules, and is designed to be specific for a relatively high GC content region so that it melts out at about 10° C. higher temperature in the PCR cycle than the forward or reverse primers. This allows the TaqMan® probe to remain fully hybridized during the PCR annealing/extension step. As the Taq polymerase enzymatically synthesizes a new strand during PCR, it will eventually reach the annealed TaqMan® probe. The Taq polymerase 5′ to 3′ endonuclease activity will then displace the TaqMan® probe by digesting it to release the fluorescent reporter molecule for quantitative detection of its now unquenched signal using a real-time fluorescent detection system.

[0067] Typical reagents (e.g., as might be found in a typical MethyLight□-based kit) for MethyLight™ analysis may include, but are not limited to: PCR primers for specific gene (or bisulfite treated DNA sequence or CpG island); TaqMan® or Lightcycler® probes; optimized PCR buffers and deoxynucleotides; and Taq polymerase.

[0068] The QM™ (quantitative methylation) assay is an alternative quantitative test for methylation patterns in genomic DNA samples, wherein sequence discrimination occurs at the level of probe hybridization. In this quantitative version, the PCR reaction provides for unbiased amplification in the presence of a fluorescent probe that overlaps a particular putative methylation site. An unbiased control for the amount of input DNA is provided by a reaction in which neither the primers, nor the probe overlie any CpG dinucleotides. Alternatively, a qualitative test for genomic methylation is achieved by probing of the biased PCR pool with either control oligonucleotides that do not “cover” known methylation sites (a fluorescence-based version of the HeavyMethyl™ and MSP techniques), or with oligonucleotides covering potential methylation sites.

[0069] The QM™ process can by used with any suitable probes e.g. “TaqMan®”, Lightcycler® etc. . . . in the amplification process. For example, double-stranded genomic DNA is treated with sodium bisulfite and subjected to unbiased primers and the TaqMan® probe. The TaqMan® probe is dual-labeled with fluorescent “reporter” and “quencher” molecules, and is designed to be specific for a relatively high GC content region so that it melts out at about 10° C. higher temperature in the PCR cycle than the forward or reverse primers. This allows the TaqMan® probe to remain fully hybridized during the PCR annealing/extension step. As the Taq polymerase enzymatically synthesizes a new strand during PCR, it will eventually reach the annealed TaqMan® probe. The Taq polymerase 5′ to 3′ endonuclease activity will then displace the TaqMan® probe by digesting it to release the fluorescent reporter molecule for quantitative detection of its now unquenched signal using a real-time fluorescent detection system.

[0070] Typical reagents (e.g., as might be found in a typical QM™-based kit) for QM™ analysis may include, but are not limited to: PCR primers for specific gene (or bisulfite treated DNA sequence or CpG island); TaqMan® or Lightcycler® probes; optimized PCR buffers and deoxynucleotides; and Taq polymerase.

[0071] Ms-SNuPE. The Ms-SNuPE™ technique is a quantitative method for assessing methylation differences at specific CpG sites based on bisulfite treatment of DNA, followed by single-nucleotide primer extension (Gonzalgo & Jones, Nucleic Acids Res. 25:2529-2531, 1997). Briefly, genomic DNA is reacted with sodium bisulfite to convert unmethylated cytosine to uracil while leaving 5-methylcytosine unchanged. Amplification of the desired target sequence is then performed using PCR primers specific for bisulfite-converted DNA, and the resulting product is isolated and used as a template for methylation analysis at the CpG site(s) of interest. Small amounts of DNA can be analyzed (e.g., microdissected pathology sections), and it avoids utilization of restriction enzymes for determining the methylation status at CpG sites.

[0072] Typical reagents (e.g., as might be found in a typical Ms-SNuPE™-based kit) for Ms-SNuPE™ analysis may include, but are not limited to: PCR primers for specific gene (or bisulfite treated DNA sequence or CpG island); optimized PCR buffers and deoxynucleotides; gel extraction kit; positive control primers; Ms-SNuPE™ primers for specific gene; reaction buffer (for the Ms-SNuPE reaction); and labeled nucleotides. Additionally, bisulfite conversion reagents may include: DNA denaturation buffer; sulfonation buffer; DNA recovery regents or kit (e.g., precipitation, ultrafiltration, affinity column); desulfonation buffer; and DNA recovery components.

[0073] The genomic sequence(s) according to at least one genomic sequence, selected from a group comprising SEQ ID NO: 7, 1, 4, 10 and 13; preferably from SEQ ID NO: 8, 2, 5, 11, 14 and most preferably from SEQ ID NO: 9, 3, 6, 12, 15, and non-naturally occurring treated variants thereof according to SEQ ID NOS: 28, 29, 30, 31, 32, 33, 58, 59, 60, 61, 62, 63, 16, 17, 18, 19, 20, 21, 22, 23, 24, 25, 26, 27, 34, 35, 36, 37, 38, 39, 40, 41, 42, 43, 44, 45, 46, 47, 48, 49, 50, 51, 52, 53, 54, 55, 56, 57, 64, 65, 66, 67, 68, 69, 70, 71, 72, 73, 74, 75, were determined to have novel utility for the detection of bladder carcinoma.

[0074] In one embodiment the method of the invention comprises the following steps: i) determining the expression of at least one gene or genomic sequence selected from the group consisting of AC051635.7, PRDM14, DMRT2, CYP1B1 and SOX1 and regulatory sequences thereof and ii) determining the presence or absence of bladder carcinoma.

[0075] The method of the invention may be enabled by means of any analysis of the expression of an RNA transcribed therefrom or polypeptide or protein translated from said RNA, preferably by means of mRNA expression analysis or polypeptide expression analysis. However, in the most preferred embodiment of the invention the detection of bladder carcinoma, is enabled by means of analysis of the methylation status of at least one gene or genomic sequence selected from the group consisting of AC051635.7, PRDM14, DMRT2, CYP1B1 and SOX1 and regulatory sequences thereof, and/or promoter or regulatory elements thereof

[0076] Accordingly the present invention also provides diagnostic assays and methods, both quantitative and qualitative for detecting the expression of at least one gene or genomic sequence selected from the group consisting of AC051635.7, PRDM14, DMRT2, CYP1B1 and SOX1 and regulatory sequences thereof in a subject and determining therefrom upon the presence or absence of bladder carcinoma in said subject.

[0077] Aberrant expression of mRNA transcribed from at least one gene or genomic sequence selected from the group consisting of AC051635.7, PRDM14, DMRT2, CYP1B1 and SOX1 and regulatory sequences thereof is associated with the presence of bladder carcinoma in a subject. According to the present invention, hyper-methylation and/or under-expression is associated with the presence of bladder carcinoma.

[0078] To detect the presence of mRNA encoding a gene or genomic sequence, a sample is obtained from a patient. The sample may be any suitable sample comprising cellular matter of the tumor. Suitable sample types include bladder tissue samples, histological slides, tissue embedded in paraffin, body fluids like blood plasma or serum, cell lines and all possible combinations thereof. It is preferred that said sample types are urine specimen.

[0079] The sample may be treated to extract the RNA contained therein. The resulting nucleic acid from the sample is then analysed. Many techniques are known in the state of the art for determining absolute and relative levels of gene expression, commonly used techniques suitable for use in the present invention include in situ hybridisation (e.g. FISH), Northern analysis, RNase protection assays (RPA), microarrays and PCR-based techniques, such as quantitative PCR and differential display PCR or any other nucleic acid detection method.

[0080] Particularly preferred is the use of the reverse transcription/polymerisation chain reaction technique (RT-PCR). The method of RT-PCR is well known in the art (for example, see Watson and Fleming, supra).

[0081] The RT-PCR method can be performed as follows. Total cellular RNA is isolated by, for example, the standard guanidium isothiocyanate method and the total RNA is reverse transcribed. The reverse transcription method involves synthesis of DNA on a template of RNA using a reverse transcriptase enzyme and a 3′ end oligonucleotide dT primer and/or random hexamer primers. The cDNA thus produced is then amplified by means of PCR. (Belyaysky et al, Nucl Acid Res 17:2919-2932, 1989; Krug and Berger, Methods in Enzymology, Academic Press, N.Y., Vol. 152, pp. 316-325, 1987 which are incorporated by reference). Further preferred is the “Real-time” variant of RT-PCR, wherein the PCR product is detected by means of hybridisation probes (e.g. TaqMan, Lightcycler, Molecular Beacons & Scorpion) or SYBR green. The detected signal from the probes or SYBR green is then quantitated either by reference to a standard curve or by comparing the Ct values to that of a calibration standard. Analysis of house-keeping genes is often used to normalize the results.

[0082] In Northern blot analysis total or poly(A)+ mRNA is run on a denaturing agarose gel and detected by hybridisation to a labelled probe in the dried gel itself or on a membrane. The resulting signal is proportional to the amount of target RNA in the RNA population.

[0083] Comparing the signals from two or more cell populations or tissues reveals relative differences in gene expression levels. Absolute quantitation can be performed by comparing the signal to a standard curve generated using known amounts of an in vitro transcript corresponding to the target RNA. Analysis of housekeeping genes, genes whose expression levels are expected to remain relatively constant regardless of conditions, is often used to normalize the results, eliminating any apparent differences caused by unequal transfer of RNA to the membrane or un-equal loading of RNA on the gel.

[0084] The first step in Northern analysis is isolating pure, intact RNA from the cells or tissue of interest. Because Northern blots distinguish RNAs by size, sample integrity influences the degree to which a signal is localized in a single band. Partially degraded RNA samples will result in the signal being smeared or distributed over several bands with an overall loss in sensitivity and possibly an erroneous interpretation of the data. In Northern blot analysis, DNA, RNA and oligonucleotide probes can be used and these probes are preferably labelled (e.g. radioactive labels, mass labels or fluorescent labels). The size of the target RNA, not the probe, will determine the size of the detected band, so methods such as random-primed labelling, which generates probes of variable lengths, are suitable for probe synthesis. The specific activity of the probe will determine the level of sensitivity, so it is preferred that probes with high specific activities, are used.

[0085] In an RNase protection assay, the RNA target and an RNA probe of a defined length are hybridised in solution. Following hybridisation, the RNA is digested with RNases specific for single-stranded nucleic acids to remove any unhybridized, single-stranded target RNA and probe. The RNases are inactivated, and the RNA is separated e.g. by denaturing polyacrylamide gel electrophoresis. The amount of intact RNA probe is proportional to the amount of target RNA in the RNA population. RPA can be used for relative and absolute quantitation of gene expression and also for mapping RNA structure, such as intron/exon boundaries and transcription start sites. The RNase protection assay is preferable to Northern blot analysis as it generally has a lower limit of detection.

[0086] The antisense RNA probes used in RPA are generated by in vitro transcription of a DNA template with a defined endpoint and are typically in the range of 50-600 nucleotides. The use of RNA probes that include additional sequences not homologous to the target RNA allows the protected fragment to be distinguished from the full-length probe. RNA probes are typically used instead of DNA probes due to the ease of generating single-stranded RNA probes and the reproducibility and reliability of RNA:RNA duplex digestion with RNases (Ausubel et al. 2003), particularly preferred are probes with high specific activities.

[0087] Particularly preferred is the use of microarrays. The microarray analysis process can be divided into two main parts. First is the immobilization of known gene sequences onto glass slides or other solid support followed by hybridisation of the fluorescently labelled cDNA (comprising the sequences to be interrogated) to the known genes immobilized on the glass slide (or other solid phase). After hybridisation, arrays are scanned using a fluorescent microarray scanner. Analysing the relative fluorescent intensity of different genes provides a measure of the differences in gene expression.

[0088] DNA arrays can be generated by immobilizing presynthesized oligonucleotides onto prepared glass slides or other solid surfaces. In this case, representative gene sequences are manufactured and prepared using standard oligonucleotide synthesis and purification methods. These synthesized gene sequences are complementary to the RNA transcript(s) of at least one gene or genomic sequence selected from the group consisting of AC051635.7, PRDM14, DMRT2, CYP1 B1 and SOX1 and regulatory sequences thereof and tend to be shorter sequences in the range of 25-70 nucleotides. Alternatively, immobilized oligos can be chemically synthesized in situ on the surface of the slide. In situ oligonucleotide synthesis involves the consecutive addition of the appropriate nucleotides to the spots on the microarray; spots not receiving a nucleotide are protected during each stage of the process using physical or virtual masks. Preferably said synthesized nucleic acids are locked nucleic acids.

[0089] In expression profiling microarray experiments, the RNA templates used are representative of the transcription profile of the cells or tissues under study. RNA is first isolated from the cell populations or tissues to be compared. Each RNA sample is then used as a template to generate fluorescently labelled cDNA via a reverse transcription reaction. Fluorescent labelling of the cDNA can be accomplished by either direct labelling or indirect labelling methods. During direct labelling, fluorescently modified nucleotides (e.g., Cy®3- or Cy®5-dCTP) are incorporated directly into the cDNA during the reverse transcription. Alternatively, indirect labelling can be achieved by incorporating aminoallyl-modified nucleotides during cDNA synthesis and then conjugating an N-hydroxysuccinimide (NHS)-ester dye to the aminoallyl-modified cDNA after the reverse transcription reaction is complete. Alternatively, the probe may be unlabelled, but may be detectable by specific binding with a ligand which is labelled, either directly or indirectly. Suitable labels and methods for labelling ligands (and probes) are known in the art, and include, for example, radioactive labels which may be incorporated by known methods (e.g., nick translation or kinasing). Other suitable labels include but are not limited to biotin, fluorescent groups, chemiluminescent groups (e.g., dioxetanes, particularly triggered dioxetanes), enzymes, antibodies, and the like.

[0090] To perform differential gene expression analysis, cDNA generated from different RNA samples are labelled with Cy®3. The resulting labelled cDNA is purified to remove unincorporated nucleotides, free dye and residual RNA. Following purification, the labelled cDNA samples are hybridised to the microarray. The stringency of hybridisation is determined by a number of factors during hybridisation and during the washing procedure, including temperature, ionic strength, length of time and concentration of formamide. These factors are outlined in, for example, Sambrook et al. (Molecular Cloning: A Laboratory Manual, 2nd ed., 1989). The microarray is scanned post-hybridisation using a fluorescent microarray scanner. The fluorescent intensity of each spot indicates the level of expression of the analysed gene; bright spots correspond to strongly expressed genes, while dim spots indicate weak expression.

[0091] Once the images are obtained, the raw data must be analysed. First, the background fluorescence must be subtracted from the fluorescence of each spot. The data is then normalized to a control sequence, such as exogenously added nucleic acids (preferably RNA or DNA), or a housekeeping gene panel to account for any non-specific hybridisation, array imperfections or variability in the array set-up, cDNA labelling, hybridisation or washing. Data normalization allows the results of multiple arrays to be compared.

[0092] Another aspect of the invention relates to a kit for use in the detection or diagnosis of bladder carcinoma in a subject according to the methods of the present invention, said kit comprising: a means for measuring the level of transcription of at least one gene or genomic sequence selected from the group consisting of AC051635.7, PRDM14, DMRT2, CYP1B1 and SOX1 and regulatory sequences thereof. In a preferred embodiment the means for measuring the level of transcription comprise oligonucleotides or polynucleotides able to hybridise under stringent or moderately stringent conditions to the transcription products of at least one gene or genomic sequence selected from the group consisting of AC051635.7, PRDM14, DMRT2, CYP1B1 and SOX1 and regulatory sequences thereof. In a most preferred embodiment the level of transcription is determined by techniques selected from the group of Northern Blot analysis, reverse transcriptase PCR, real-time PCR, RNAse protection, and microarray. In another embodiment of the invention the kit further comprises means for obtaining a biological sample of the patient. Preferred is a kit, which further comprises a container which is most preferably suitable for containing the means for measuring the level of transcription and the biological sample of the patient, and most preferably further comprises instructions for use and interpretation of the kit results.

[0093] In a preferred embodiment the kit comprises (a) a plurality of oligonucleotides or polynucleotides able to hybridise under stringent or moderately stringent conditions to the transcription products of at least one gene or genomic sequence selected from the group consisting of AC051635.7, PRDM14, DMRT2, CYP1B1 and SOX1 and regulatory sequences thereof (b) a container, preferably suitable for containing the oligonucleotides or polynucleotides and a biological sample of the patient comprising the transcription products wherein the oligonucleotides or polynucleotides can hybridise under stringent or moderately stringent conditions to the transcription products, (c) means to detect the hybridisation of (b); and optionally, (d) instructions for use and interpretation of the kit results. It is also preferred that the kit comprises (a) a plurality of oligonucleotides or polynucleotides able to hybridise under stringent or moderately stringent conditions to the transcription products of at least one gene or genomic sequence selected from the group consisting of SEQ ID NO: 96, SEQ ID NO: 97, SEQ ID NO: 98, SEQ ID NO: 99 and SEQ ID NO: 100 and regulatory sequences thereof; (b) a container suitable for containing the oligonucleotides or polynucleotides and a biological sample of the patient comprising the transcription products wherein the oligonucleotides or polynucleotides can hybridise under stringent or moderately stringent conditions to the transcription products, (c) means to detect the hybridisation of (b); and optionally, (d) instructions for use and interpretation of the kit results.

[0094] The kit may also contain other components such as hybridisation buffer (where the oligonucleotides are to be used as a probe) packaged in a separate container. Alternatively, where the oligonucleotides are to be used to amplify a target region, the kit may contain, packaged in separate containers, a polymerase and a reaction buffer optimised for primer extension mediated by the polymerase, such as PCR. Preferably said polymerase is a reverse transcriptase. It is further preferred that said kit further contains an Rnase reagent.

[0095] The present invention further provides for methods for the detection of the presence of the polypeptide encoded by said gene sequences in a sample obtained from a patient.

[0096] Aberrant levels of polypeptide expression of the polypeptides encoded at least one gene or genomic sequence selected from the group consisting of AC051635.7, PRDM14, DMRT2, CYP1B1 and SOX1 and regulatory sequences thereof are associated with the presence of bladder carcinoma.

[0097] According to the present invention under-expression of said polypeptides is associated with the presence of bladder carcinoma.

[0098] Any method known in the art for detecting polypeptides can be used. Such methods include, but are not limited to masss-spectrometry, immunodiffusion, immunoelectrophoresis, immunochemical methods, binder-ligand assays, immunohistochemical techniques, agglutination and complement assays (e.g., see Basic and Clinical Immunology, Sites and Terr, eds., Appleton & Lange, Norwalk, Conn. pp 217-262, 1991 which is incorporated by reference). Preferred are binder-ligand immunoassay methods including reacting antibodies with an epitope or epitopes and competitively displacing a labelled polypeptide or derivative thereof.

[0099] Certain embodiments of the present invention comprise the use of antibodies specific to the polypeptide(s) encoded by at least one gene or genomic sequence selected from the group consisting of AC051635.7, PRDM14, DMRT2, CYP1B1 and SOX1 and regulatory sequences thereof.

[0100] Such antibodies are useful for the diagnosis of bladder carcinoma. In certain embodiments production of monoclonal or polyclonal antibodies can be induced by the use of an epitope encoded by a polypeptide of at least one gene or genomic sequence selected from the group consisting of AC051635.7, PRDM14, DMRT2, CYP1B1 and SOX1 and regulatory sequences thereof as an antigene. Such antibodies may in turn be used to detect expressed polypeptides as markers for cell proliferative disorders, preferably bladder carcinoma diagnosis. The levels of such polypeptides present may be quantified by conventional methods. Antibody-polypeptide binding may be detected and quantified by a variety of means known in the art, such as labelling with fluorescent or radioactive ligands. The invention further comprises kits for performing the above-mentioned procedures, wherein such kits contain antibodies specific for the investigated polypeptides.

[0101] Numerous competitive and non-competitive polypeptide binding immunoassays are well known in the art. Antibodies employed in such assays may be unlabelled, for example as used in agglutination tests, or labelled for use a wide variety of assay methods. Labels that can be used include radionuclides, enzymes, fluorescers, chemiluminescers, enzyme substrates or cofactors, enzyme inhibitors, particles, dyes and the like. Preferred assays include but are not limited to radioimmunoassay (RIA), enzyme immunoassays, e.g., enzyme-linked immunosorbent assay (ELISA), fluorescent immunoassays and the like. Polyclonal or monoclonal antibodies or epitopes thereof can be made for use in immunoassays by any of a number of methods known in the art.

[0102] In an alternative embodiment of the method the proteins may be detected by means of western blot analysis. Said analysis is standard in the art, briefly proteins are separated by means of electrophoresis e.g. SDS-PAGE. The separated proteins are then transferred to a suitable membrane (or paper) e.g. nitrocellulose, retaining the spacial separation achieved by electrophoresis. The membrane is then incubated with a blocking agent to bind remaining sticky places on the membrane, commonly used agents include generic protein (e.g. milk protein). An antibody specific to the protein of interest is then added, said antibody being detectably labelled for example by dyes or enzymatic means (e.g. alkaline phosphatase or horseradish peroxidase). The location of the antibody on the membrane is then detected.

[0103] In an alternative embodiment of the method the proteins may be detected by means of immunohistochemistry (the use of antibodies to probe specific antigens in a sample). Said analysis is standard in the art, wherein detection of antigens in tissues is known as immunohistochemistry, while detection in cultured cells is generally termed immunocytochemistry. Briefly the primary antibody to be detected by binding to its specific antigen. The antibody-antigen complex is then bound by a secondary enzyme conjugated antibody. In the presence of the necessary substrate and chromogen the bound enzyme is detected according to coloured deposits at the antibody-antigen binding sites. There is a wide range of suitable sample types, antigen-antibody affinity, antibody types, and detection enhancement methods. Thus optimal conditions for immunohistochemical or immunocytochemical detection must be determined by the person skilled in the art for each individual case.

[0104] One approach for preparing antibodies to a polypeptide is the selection and preparation of an amino acid sequence of all or part of the polypeptide, chemically synthesising the amino acid sequence and injecting it into an appropriate animal, usually a rabbit or a mouse (Milstein and Kohler Nature 256:495-497, 1975; Gulfre and Milstein, Methods in Enzymology: Immunochemical Techniques 73:1-46, Langone and Banatis eds., Academic Press, 1981 which are incorporated by reference in its entirety). Methods for preparation of the polypeptides or epitopes thereof include, but are not limited to chemical synthesis, recombinant DNA techniques or isolation from biological samples.

[0105] In the final step of the method the diagnosis of the patient is determined, whereby under-expression (of mRNA or polypeptides) is indicative of the presence of bladder carcinoma. The term under-expression shall be taken to mean expression at a detected level less than a pre-determined cut off which may be selected from the group consisting of the mean, median or an optimised threshold value. The term over-expression shall be taken to mean expression at a detected level greater than a pre-determined cut off which may be selected from the group consisting of the mean, median or an optimised threshold value.

[0106] Another aspect of the invention provides a kit for use in diagnosis of bladder carcinoma in a subject according to the methods of the present invention, comprising: a means for detecting at least one gene or genomic sequence selected from the group consisting of AC051635.7, PRDM14, DMRT2, CYP1 B1 and SOX1 and regulatory sequences thereof and polypeptides encoded by said genomic sequences. The means for detecting the polypeptides comprise preferably antibodies, antibody derivatives, or antibody fragments. The polypeptides are most preferably detected by means of Western Blotting utilizing a labelled antibody. In another embodiment of the invention the kit is further comprises means for obtaining a biological sample of the patient. Preferred is a kit, which further comprises a container suitable for containing the means for detecting the polypeptides in the biological sample of the patient, and most preferably further comprises instructions for use and interpretation of the kit results. In a preferred embodiment the kit comprises: (a) a means for detecting at least one gene or genomic sequence selected from the group consisting of AC051635.7, PRDM14, DMRT2, CYP1B1 and SOX1 and regulatory sequences thereof and polypeptides encoded by said genes and genomic sequences; (b) a container suitable for containing the said means and the biological sample of the patient comprising the polypeptides wherein the means can form complexes with the polypeptides; (c) a means to detect the complexes of (b); and optionally (d) instructions for use and interpretation of the kit results. Also preferred is a kit comprising (a) a means for detecting at least one gene or genomic sequence selected from the group consisting of SEQ ID NO: 96, SEQ ID NO: 97, SEQ ID NO: 98, SEQ ID NO: 99 and SEQ ID NO: 100 and regulatory sequences thereof and polypeptides encoded by said genes and genomic sequences; (b) a container suitable for containing the said means and the biological sample of the patient comprising the polypeptides wherein the means can form complexes with the polypeptides; (c) a means to detect the complexes of (b); and optionally (d) instructions for use and interpretation of the kit results.

[0107] The kit may also contain other components such as buffers or solutions suitable for blocking, washing or coating, packaged in a separate container.

[0108] Particular embodiments of the present invention provide a novel application of the analysis of methylation levels and/or patterns within at least one gene or genomic sequence selected from the group consisting of AC051635.7, PRDM14, DMRT2, CYP1B1 and SOX1 and regulatory sequences thereof that enables a precise detection, characterisation and/or treatment of bladder carcinoma. Early detection of bladder carcinoma is directly linked with disease prognosis, and the disclosed method thereby enables the physician and patient to make better and more informed treatment decisions.

[0109] In the most preferred embodiment of the method, the presence or absence of bladder carcinoma is determined by analysis of the methylation status of one or more CpG dinucleotides of at least one gene or genomic sequence selected from the group consisting of AC051635.7, PRDM14, DMRT2, CYP1B1 and SOX1 and regulatory sequences thereof.

[0110] In one embodiment the invention of said method comprises the following steps: i) contacting genomic DNA (preferably isolated from urine specimen) obtained from the subject with at least one reagent, or series of reagents that distinguishes between methylated and non-methylated CpG dinucleotides within at least one gene or genomic sequence selected from the group consisting of AC051635.7, PRDM14, DMRT2, CYP1B1 and SOX1 and regulatory sequences thereof (including promoter and regulatory regions thereof) and ii) detecting bladder carcinoma.

[0111] It is preferred that said one or more CpG dinucleotides of at least one gene or genomic sequence selected from the group consisting of AC051635.7, PRDM14, DMRT2, CYP1B1 and SOX1 and regulatory sequences thereof are comprised within at least one respective genomic target sequence, selected from a group comprising SEQ ID NO: 7, 1, 4, 10 and 13; preferably from SEQ ID NO: 8, 2, 5, 11, 14 and most preferably from SEQ ID NO: 9, 3, 6, 12, 15 and complements thereof. The present invention further provides a method for ascertaining genetic and/or epigenetic parameters of at least one gene or genomic sequence selected from the group consisting of AC051635.7, PRDM14, DMRT2, CYP1B1 and SOX1 and regulatory sequences thereof and/or at least one genomic sequence, selected from a group comprising SEQ ID NO: 7, 1, 4, 10 and 13; preferably from SEQ ID NO: 8, 2, 5, 11, 14 and most preferably from SEQ ID NO: 9, 3, 6, 12, 15 within a subject by analyzing cytosine methylation. Said method comprising contacting a nucleic acid comprising at least one genomic sequence, selected from a group comprising SEQ ID NO: 7, 1, 4, 10 and 13; preferably from SEQ ID NO: 8, 2, 5, 11, 14 and most preferably from SEQ ID NO: 9, 3, 6, 12, 15 in a biological sample obtained from said subject with at least one reagent or a series of reagents, wherein said reagent or series of reagents, distinguishes between methylated and non-methylated CpG dinucleotides within the target nucleic acid.

[0112] In a preferred embodiment, said method comprises the following steps: In the first step, a sample of the tissue to be analysed is obtained. The source may be any suitable source, such as bladder tissue samples, histological slides, tissue embedded in paraffin, body fluids like blood plasma or serum, cell lines and all possible combinations thereof. It is preferred that said sources of DNA are urine specimen.

[0113] The genomic DNA is then isolated from the sample. Genomic DNA may be isolated by any means standard in the art, including the use of commercially available kits. Briefly, wherein the DNA of interest is encapsulated in by a cellular membrane the biological sample must be disrupted and lysed by enzymatic, chemical or mechanical means. The DNA solution may then be cleared of proteins and other contaminants e.g. by digestion with proteinase K. The genomic DNA is then recovered from the solution. This may be carried out by means of a variety of methods including salting out, organic extraction or binding of the DNA to a solid phase support. The choice of method will be affected by several factors including time, expense and required quantity of DNA.

[0114] Wherein the sample DNA is not enclosed in a membrane (e.g. circulating DNA from a blood sample) methods standard in the art for the isolation and/or purification of DNA may be employed. Such methods include the use of a protein degenerating reagent e.g. chaotropic salt e.g. guanidine hydrochloride or urea; or a detergent e.g. sodium dodecyl sulphate (SDS), cyanogen bromide. Alternative methods include but are not limited to ethanol precipitation or propanol precipitation, vacuum concentration amongst others by means of a centrifuge. The person skilled in the art may also make use of devices such as filter devices e.g. ultrafiltration, silica surfaces or membranes, magnetic particles, polystyrol particles, polystyrol surfaces, positively charged surfaces, and positively charged membranse, charged membranes, charged surfaces, charged switch membranes, charged switched surfaces.

[0115] Once the nucleic acids have been extracted, the genomic double stranded DNA is used in the analysis.

[0116] In the second step of the method, the genomic DNA sample is treated in such a manner that cytosine bases which are unmethylated at the 5′-position are converted to uracil, thymine, or another base which is dissimilar to cytosine in terms of hybridisation behaviour. This will be understood as ‘pre-treatment’ or ‘treatment’ herein.

[0117] This is preferably achieved by means of treatment with a bisulfite reagent. The term “bisulfite reagent” refers to a reagent comprising bisulfite, disulfite, hydrogen sulfite or combinations thereof, useful as disclosed herein to distinguish between methylated and unmethylated CpG dinucleotide sequences. Methods of said treatment are known in the art (e.g. PCT/EP2004/011715, which is incorporated by reference in its entirety). It is preferred that the bisulfite treatment is conducted in the presence of denaturing solvents such as but not limited to n-alkylenglycol, particularly diethylene glycol dimethyl ether (DME), or in the presence of dioxane or dioxane derivatives. In a preferred embodiment the denaturing solvents are used in concentrations between 1% and 35% (v/v). It is also preferred that the bisulfite reaction is carried out in the presence of scavengers such as but not limited to chromane derivatives, e.g., 6-hydroxy-2,5,7,8, -tetramethylchromane 2-carboxylic acid or trihydroxybenzoe acid and derivates thereof, e.g. Gallic acid (see: PCT/EP2004/011715 which is incorporated by reference in its entirety). The bisulfite conversion is preferably carried out at a reaction temperature between 30° C. and 70° C., whereby the temperature is increased to over 85° C. for short periods of times during the reaction (see: PCT/EP2004/011715 which is incorporated by reference in its entirety). The bisulfite treated DNA is preferably purified prior to the quantification. This may be conducted by any means known in the art, such as but not limited to ultrafiltration, preferably carried out by means of Microcon^{Λ}™ columns (manufactured by Millipore^{Λ}™). The purification is carried out according to a modified manufacturer's protocol (see: PCT/EP2004/011715 which is incorporated by reference in its entirety).

[0118] In the third step of the method, fragments of the treated DNA are amplified, using sets of primer oligonucleotides according to the present invention, and an amplification enzyme. The amplification of several DNA segments can be carried out simultaneously in one and the same reaction vessel. Typically, the amplification is carried out using a polymerase chain reaction (PCR). Preferably said amplificates are 100 to 2,000 base pairs in length. The set of primer oligonucleotides includes at least two oligonucleotides whose sequences are each reverse complementary, identical, or hybridise under stringent or highly stringent conditions to an at least 16-base-pair long segment of the base sequences of one of SEQ ID NOS: 28, 29, 30, 31, 32, 33, 58, 59, 60, 61, 62, 63, 16, 17, 18, 19, 20, 21, 22, 23, 24, 25, 26, 27, 34, 35, 36, 37, 38, 39, 40, 41, 42, 43, 44, 45, 46, 47, 48, 49, 50, 51, 52, 53, 54, 55, 56, 57, 64, 65, 66, 67, 68, 69, 70, 71, 72, 73, 74, 75 and sequences complementary thereto.

[0119] In an alternate embodiment of the method, the methylation status of pre-selected CpG positions within at least one gene or genomic sequence selected from the group consisting of AC051635.7, PRDM14, DMRT2, CYP1B1 and SOX1 and regulatory sequences thereof and preferably within the nucleic acid sequences according to at least one genomic sequence, selected from a group comprising SEQ ID NO: 7, 1, 4, 10 and 13; preferably from SEQ ID NO: 8, 2, 5, 11, 14 and most preferably from SEQ ID NO: 9, 3, 6, 12, 15, may be detected by use of methylation-specific primer oligonucleotides. This technique (MSP) has been described in U.S. Pat. No. 6,265,171 to Herman. The use of methylation status specific primers for the amplification of bisulfite treated DNA allows the differentiation between methylated and unmethylated nucleic acids. MSP primers pairs contain at least one primer which hybridises to a bisulfite treated CpG dinucleotide. Therefore, the sequence of said primers comprises at least one CpG dinucleotide. MSP primers specific for non-methylated DNA contain a “T′ at the position of the C position in the CpG. Preferably, therefore, the base sequence of said primers is required to comprise a sequence having a length of at least 9 nucleotides which hybridises to a treated nucleic acid sequence according to one of SEQ ID NOS: 28, 29, 30, 31, 32, 33, 58, 59, 60, 61, 62, 63, 16, 17, 18, 19, 20, 21, 22, 23, 24, 25, 26, 27, 34, 35, 36, 37, 38, 39, 40, 41, 42, 43, 44, 45, 46, 47, 48, 49, 50, 51, 52, 53, 54, 55, 56, 57, 64, 65, 66, 67, 68, 69, 70, 71, 72, 73, 74, 75 and sequences complementary thereto, wherein the base sequence of said oligomers comprises at least one CpG dinucleotide. A further preferred embodiment of the method comprises the use of blocker oligonucleotides (the HeavyMethyl™ assay). The use of such blocker oligonucleotides has been described by Yu et al., Bio Techniques 23:714-720, 1997. Blocking probe oligonucleotides are hybridised to the bisulfite treated nucleic acid concurrently with the PCR primers. PCR amplification of the nucleic acid is terminated at the 5′ position of the blocking probe, such that amplification of a nucleic acid is suppressed where the complementary sequence to the blocking probe is present. The probes may be designed to hybridize to the bisulfite treated nucleic acid in a methylation status specific manner. For example, for detection of methylated nucleic acids within a population of unmethylated nucleic acids, suppression of the amplification of nucleic acids which are unmethylated at the position in question would be carried out by the use of blocking probes comprising a ‘CpA’ or ‘TpA’ at the position in question, as opposed to a ‘CpG’ if the suppression of amplification of methylated nucleic acids is desired.

[0120] For PCR methods using blocker oligonucleotides, efficient disruption of polymerase-mediated amplification requires that blocker oligonucleotides not be elongated by the polymerase. Preferably, this is achieved through the use of blockers that are 3′-deoxyoligonucleotides, or oligonucleotides derivitized at the 3′ position with other than a “free” hydroxyl group. For example, 3′-O-acetyl oligonucleotides are representative of a preferred class of blocker molecule.

[0121] Additionally, polymerase-mediated decomposition of the blocker oligonucleotides should be precluded. Preferably, such preclusion comprises either use of a polymerase lacking 5′-3′ exonuclease activity, or use of modified blocker oligonucleotides having, for example, thioate bridges at the 5′-termini thereof that render the blocker molecule nuclease-resistant. Particular applications may not require such 5′ modifications of the blocker. For example, if the blocker- and primer-binding sites overlap, thereby precluding binding of the primer (e.g., with excess blocker), degradation of the blocker oligonucleotide will be substantially precluded. This is because the polymerase will not extend the primer toward, and through (in the 5′-3′ direction) the blocker—a process that normally results in degradation of the hybridized blocker oligonucleotide.

[0122] A particularly preferred blocker/PCR embodiment, for purposes of the present invention and as implemented herein, comprises the use of peptide nucleic acid (PNA) oligomers as blocking oligonucleotides. Such PNA blocker oligomers are ideally suited, because they are neither decomposed nor extended by the polymerase.

[0123] Preferably, therefore, the base sequence of said blocking oligonucleotides is required to comprise a sequence having a length of at least 9 nucleotides which hybridises to a treated nucleic acid sequence according to one of SEQ ID NOS: 28, 29, 30, 31, 32, 33, 58, 59, 60, 61, 62, 63, 16, 17, 18, 19, 20, 21, 22, 23, 24, 25, 26, 27, 34, 35, 36, 37, 38, 39, 40, 41, 42, 43, 44, 45, 46, 47, 48, 49, 50, 51, 52, 53, 54, 55, 56, 57, 64, 65, 66, 67, 68, 69, 70, 71, 72, 73, 74, 75 and sequences complementary thereto, wherein the base sequence of said oligonucleotides comprises at least one CpG, TpG or CpA dinucleotide.

[0124] The fragments obtained by means of the amplification can carry a directly or indirectly detectable label. Preferred are labels in the form of fluorescence labels, radionuclides, or detachable molecule fragments having a typical mass which can be detected in a mass spectrometer. Where said labels are mass labels, it is preferred that the labelled amplificates have a single positive or negative net charge, allowing for better delectability in the mass spectrometer. The detection may be carried out and visualized by means of, e.g., matrix assisted laser desorption/ionization mass spectrometry (MALDI) or using electron spray mass spectrometry (ESI).

[0125] Matrix Assisted Laser Desorption/Ionization Mass Spectrometry (MALDI-TOF) is a very efficient development for the analysis of biomolecules (Karas & Hillenkamp, Anal Chem., 60:2299-301, 1988). An analyte is embedded in a light-absorbing matrix. The matrix is evaporated by a short laser pulse thus transporting the analyte molecule into the vapor phase in an unfragmented manner. The analyte is ionized by collisions with matrix molecules. An applied voltage accelerates the ions into a field-free flight tube. Due to their different masses, the ions are accelerated at different rates. Smaller ions reach the detector sooner than bigger ones. MALDI-TOF spectrometry is well suited to the analysis of peptides and proteins. The analysis of nucleic acids is somewhat more difficult (Gut & Beck, Current Innovations and Future Trends, 1:147-57, 1995). The sensitivity with respect to nucleic acid analysis is approximately 100-times less than for peptides, and decreases disproportionally with increasing fragment size. Moreover, for nucleic acids having a multiply negatively charged backbone, the ionization process via the matrix is considerably less efficient. In MALDI-TOF spectrometry, the selection of the matrix plays an eminently important role. For desorption of peptides, several very efficient matrixes have been found which produce a very fine crystallisation. There are now several responsive matrixes for DNA, however, the difference in sensitivity between peptides and nucleic acids has not been reduced. This difference in sensitivity can be reduced, however, by chemically modifying the DNA in such a manner that it becomes more similar to a peptide. For example, phosphorothioate nucleic acids, in which the usual phosphates of the backbone are substituted with thiophosphates, can be converted into a charge-neutral DNA using simple alkylation chemistry (Gut & Beck, Nucleic Acids Res. 23: 1367-73, 1995). The coupling of a charge tag to this modified DNA results in an increase in MALDI-TOF sensitivity to the same level as that found for peptides. A further advantage of charge tagging is the increased stability of the analysis against impurities, which makes the detection of unmodified substrates considerably more difficult.

[0126] In the fourth step of the method, the amplificates obtained during the third step of the method are analysed in order to ascertain the methylation status of the CpG dinucleotides prior to the treatment.

[0127] In embodiments where the amplificates were obtained by means of MSP amplification, the presence or absence of an amplificate is in itself indicative of the methylation state of the CpG positions covered by the primer, according to the base sequences of said primer.

[0128] Amplificates obtained by means of both standard and methylation specific PCR may be further analysed by means of based-based methods such as, but not limited to, array technology and probe based technologies as well as by means of techniques such as sequencing and template directed extension.

[0129] In one embodiment of the method, the amplificates synthesised in step three are subsequently hybridized to an array or a set of oligonucleotides and/or PNA probes. In this context, the hybridization takes place in the following manner: the set of probes used during the hybridization is preferably composed of at least 2 oligonucleotides or PNA-oligomers; in the process, the amplificates serve as probes which hybridize to oligonucleotides previously bonded to a solid phase; the non-hybridized fragments are subsequently removed; said oligonucleotides contain at least one base sequence having a length of at least 9 nucleotides which is reverse complementary or identical to a segment of the base sequences specified in the present Sequence Listing; and the segment comprises at least one CpG, TpG or CpA dinucleotide. The hybridizing portion of the hybridizing nucleic acids is typically at least 9, 15, 20, 25, 30 or 35 nucleotides in length. However, longer molecules have inventive utility, and are thus within the scope of the present invention.

[0130] In a preferred embodiment, said dinucleotide is present in the central third of the oligomer. For example, wherein the oligomer comprises one CpG dinucleotide, said dinucleotide is preferably the fifth to ninth nucleotide from the 5′-end of a 13-mer. One oligonucleotide exists for the analysis of each CpG dinucleotide within a sequence selected from the group consisting of SEQ ID NO: 7, 1, 4, 10 and 13; preferably from SEQ ID NO: 8, 2, 5, 11, 14 and most preferably from SEQ ID NO: 9, 3, 6, 12, 15, and the equivalent positions within SEQ ID NOS: 28, 29, 30, 31, 32, 33, 58, 59, 60, 61, 62, 63, 16, 17, 18, 19, 20, 21, 22, 23, 24, 25, 26, 27, 34, 35, 36, 37, 38, 39, 40, 41, 42, 43, 44, 45, 46, 47, 48, 49, 50, 51, 52, 53, 54, 55, 56, 57, 64, 65, 66, 67, 68, 69, 70, 71, 72, 73, 74, 75. Said oligonucleotides may also be present in the form of peptide nucleic acids. The non-hybridised amplificates are then removed. The hybridised amplificates are then detected. In this context, it is preferred that labels attached to the amplificates are identifiable at each position of the solid phase at which an oligonucleotide sequence is located.

[0131] In yet a further embodiment of the method, the genomic methylation status of the CpG positions may be ascertained by means of oligonucleotide probes (as detailed above) that are hybridised to the bisulfite treated DNA concurrently with the PCR amplification primers (wherein said primers may either be methylation specific or standard).

[0132] A particularly preferred embodiment of this method is the use of fluorescence-based Real Time Quantitative PCR (Heid et al., Genome Res. 6:986-994, 1996; also see U.S. Pat. No. 6,331,393) employing a dual-labelled fluorescent oligonucleotide probe (TaqMan™ PCR, using an ABI Prism 7700 Sequence Detection System, Perkin Elmer Applied Biosystems, Foster City, Calif.). The TaqMan™ PCR reaction employs the use of a non-extendible interrogating oligonucleotide, called a TaqMan™ probe, which, in preferred embodiments, is designed to hybridise to a CpG-rich sequence located between the forward and reverse amplification primers. The TaqMan™ probe further comprises a fluorescent “reporter moiety” and a “quencher moiety” covalently bound to linker moieties (e.g., phosphoramidites) attached to the nucleotides of the TaqMan™ oligonucleotide. For analysis of methylation within nucleic acids subsequent to bisulfite treatment, it is required that the probe be methylation specific, as described in U.S. Pat. No. 6,331,393, (hereby incorporated by reference in its entirety) also known as the MethyLight™ assay. Variations on the TaqMan™ detection methodology that are also suitable for use with the described invention include the use of dual-probe technology (Lightcycler™) or fluorescent amplification primers (Sunrise™ technology). Both these techniques may be adapted in a manner suitable for use with bisulfite treated DNA, and more-over for methylation analysis within CpG dinucleotides.

[0133] In a further preferred embodiment of the method, the fourth step of the method comprises the use of template-directed oligonucleotide extension, such as MS-SNuPE as described by Gonzalgo & Jones, Nucleic Acids Res. 25:2529-2531, 1997.

[0134] In yet a further embodiment of the method, the fourth step of the method comprises sequencing and subsequent sequence analysis of the amplificate generated in the third step of the method (Sanger F., et al., Proc Natl Acad Sci USA 74:5463-5467, 1977).

### BEST MODE

[0135] In the most preferred embodiment of the method the genomic nucleic acids are isolated and treated according to the first three steps of the method outlined above, namely:
[0136] a) obtaining, from a subject, a biological sample having subject genomic DNA;
[0137] b) extracting or otherwise isolating the genomic DNA;
[0138] c) treating the genomic DNA of b), or a fragment thereof, with one or more reagents to convert cytosine bases that are unmethylated in the 5-position thereof to uracil or to another base that is detectably dissimilar to cytosine in terms of hybridization properties; and wherein
[0139] d) amplifying subsequent to treatment in c) is carried out in a methylation specific manner, namely by use of methylation specific primers or blocking oligonucleotides, and further wherein
[0140] e) detecting of the amplificates is carried out by means of a real-time detection probe, as described above.

[0141] Preferably, where the subsequent amplification of d) is carried out by means of methylation specific primers, as described above, said methylation specific primers comprise a sequence having a length of at least 9 nucleotides which hybridises to a treated nucleic acid sequence according to one of SEQ ID NOS: 28, 29, 30, 31, 32, 33, 58, 59, 60, 61, 62, 63, 16, 17, 18, 19, 20, 21, 22, 23, 24, 25, 26, 27, 34, 35, 36, 37, 38, 39, 40, 41, 42, 43, 44, 45, 46, 47, 48, 49, 50, 51, 52, 53, 54, 55, 56, 57, 64, 65, 66, 67, 68, 69, 70, 71, 72, 73, 74, 75 and sequences complementary thereto, wherein the base sequence of said oligomers comprise at least one CpG dinucleotide.

[0142] Step e) of the method, namely the detection of the specific amplificates indicative of the methylation status of one or more CpG positions according to at least one genomic sequence, selected from a group comprising SEQ ID NO: 7, 1, 4, 10 and 13; preferably from SEQ ID NO: 8, 2, 5, 11, 14 and most preferably from SEQ ID NO: 9, 3, 6, 12, 15 is carried out by means of real-time detection methods as described above.

[0143] Most preferably, the invention provides a method for detecting bladder carcinoma comprising determining the methylation status and/or the expression level of at least one gene or genomic sequence, selected from the group consisting of SEQ ID NO: 96, SEQ ID NO: 97, SEQ ID NO: 98, SEQ ID NO: 99 and SEQ ID NO: 100 and regulatory sequences thereof in a biological sample isolated from a subject, wherein hyper-methylation and/or under-expression is indicative of the presence of said disorder.

[0144] Additional embodiments of the invention provide a method for the analysis of the methylation status of the at least one gene or genomic sequence selected from the group consisting of AC051635.7, PRDM14, DMRT2, CYP1B1 and SOX1 and regulatory sequences thereof, preferably derived from at least one genomic sequence and complements thereof, selected from a group comprising SEQ ID NO: 7, 1, 4, 10 and 13; preferably from SEQ ID NO: 8, 2, 5, 11, 14 and most preferably from SEQ ID NO: 9, 3, 6, 12, 15 without the need for bisulfite conversion. Methods are known in the art wherein a methylation sensitive restriction enzyme reagent, or a series of restriction enzyme reagents comprising methylation sensitive restriction enzyme reagents that distinguish between methylated and non-methylated CpG dinucleotides within a target region are utilized in determining methylation, for example but not limited to differential methylation hybridization (DMH).

[0145] In the first step of such additional embodiments, the genomic DNA sample is isolated from tissue or cellular sources. Genomic DNA may be isolated by any means standard in the art, including the use of commercially available kits. Briefly, wherein the DNA of interest is encapsulated in by a cellular membrane the biological sample must be disrupted and lysed by enzymatic, chemical or mechanical means. The DNA solution may then be cleared of proteins and other contaminants, e.g., by digestion with proteinase K. The genomic DNA is then recovered from the solution. This may be carried out by means of a variety of methods including salting out, organic extraction or binding of the DNA to a solid phase support. The choice of method will be affected by several factors including time, expense and required quantity of DNA. All clinical sample types comprising neoplastic or potentially neoplastic matter are suitable for us e in the present method, preferred are bladder tissue samples, histological slides, tissue embedded in paraffin, body fluids like blood plasma or serum, cell lines and combinations thereof. Body fluids are the preferred source of the DNA; particularly preferred are urine specimen.

[0146] Once the nucleic acids have been extracted, the genomic double-stranded DNA is used in the analysis.

[0147] In a preferred embodiment, the DNA may be cleaved prior to treatment with methylation sensitive restriction enzymes. Such methods are known in the art and may include both physical and enzymatic means. Particularly preferred is the use of one or a plurality of restriction enzymes which are not methylation sensitive, and whose recognition sites are AT rich and do not comprise CG dinucleotides. The use of such enzymes enables the conservation of CpG islands and CpG rich regions in the fragmented DNA. The non-methylation-specific restriction enzymes are preferably selected from the group consisting of Msel, Bfal, Csp6l, Tru1l, Tvu1l, Tru9l, Tvu9l, Mael and Xspl. Particularly preferred is the use of two or three such enzymes. Particularly preferred is the use of a combination of Msel, Bfal and Csp6l.

[0148] The fragmented DNA may then be ligated to adaptor oligonucleotides in order to facilitate subsequent enzymatic amplification. The ligation of oligonucleotides to blunt and sticky ended DNA fragments is known in the art, and is carried out by means of dephosphorylation of the ends (e.g. using calf or shrimp alkaline phosphatase) and subsequent ligation using ligase enzymes (e.g. T4 DNA ligase) in the presence of dATPs. The adaptor oligonucleotides are typically at least 18 base pairs in length.

[0149] In the third step, the DNA (or fragments thereof) is then digested with one or more methylation sensitive restriction enzymes. The digestion is carried out such that hydrolysis of the DNA at the restriction site is informative of the methylation status of a specific CpG dinucleotide of at least one gene or genomic sequence selected from the group consisting of AC051635.7, PRDM14, DMRT2, CYP1 B1 and SOX1 and regulatory sequences thereof .

[0150] Preferably, the methylation-specific restriction enzyme is selected from the group consisting of Bsi E1, Hga I HinPI, Hpy99I, Ava I, Bce AI, Bsa HI, BisI, BstUI, BsI236I, AccII, BstFNI, McrBC, GlaI, MvnI, HpaII (HapII), HhaI, AciI, SmaI, HinP1I, HpyCH4IV, EagI and mixtures of two or more of the above enzymes. Preferred is a mixture containing the restriction enzymes BstUI, HpaII, HpyCH4IV and HinP1I.

[0151] In the fourth step, which is optional but a preferred embodiment, the restriction fragments are amplified. This is preferably carried out using a polymerase chain reaction, and said amplificates may carry suitable detectable labels as discussed above, namely fluorophore labels, radionuclides and mass labels. Particularly preferred is amplification by means of an amplification enzyme and at least two primers comprising, in each case a contiguous sequence at least 16 nucleotides in length that is complementary to, or hybridizes under moderately stringent or stringent conditions to a sequence selected from a group comprising SEQ ID NO: 7, 1, 4, 10 and 13; preferably from SEQ ID NO: 8, 2, 5, 11, 14 and most preferably from SEQ ID NO: 9, 3, 6, 12, 15, and complements thereof. Preferably said contiguous sequence is at least 16, 20 or 25 nucleotides in length. In an alternative embodiment said primers may be complementary to any adaptors linked to the fragments.

[0152] In the fifth step the amplificates are detected. The detection may be by any means standard in the art, for example, but not limited to, gel electrophoresis analysis, hybridisation analysis, incorporation of detectable tags within the PCR products, DNA array analysis, MALDI or ESI analysis. Preferably said detection is carried out by hybridisation to at least one nucleic acid or peptide nucleic acid comprising in each case a contiguous sequence at least 16 nucleotides in length that is complementary to, or hybridizes under moderately stringent or stringent conditions to a sequence selected from a group comprising SEQ ID NO: 7, 1, 4, 10 and 13; preferably from SEQ ID NO: 8, 2, 5, 11, 14 and most preferably from SEQ ID NO: 9, 3, 6, 12, 15, and complements thereof. Preferably said contiguous sequence is at least 16, 20 or 25 nucleotides in length.

[0153] Subsequent to the determination of the methylation state or level of the genomic nucleic acids the presence, absence of bladder carcinoma, is deduced based upon the methylation state or level of at least one CpG dinucleotide sequence of at least one genomic sequence, selected from a group comprising SEQ ID NO: 7, 1, 4, 10 and 13; preferably from SEQ ID NO: 8, 2, 5, 11, 14 and most preferably from SEQ ID NO: 9, 3, 6, 12, 15, or an average, or a value reflecting an average methylation state of a plurality of CpG dinucleotide sequences of at least one genomic sequence, selected from a group comprising SEQ ID NO: 7, 1, 4, 10 and 13; preferably from SEQ ID NO: 8, 2, 5, 11, 14 and most preferably from SEQ ID NO: 9, 3, 6, 12, 15 wherein methylation is associated with the presence of bladder carcinoma. Wherein said methylation is determined by quantitative means the cut-off point for determining said the presence of methylation is preferably zero (i.e. wherein a sample displays any degree of methylation it is determined as having a methylated status at the analysed CpG position). Nonetheless, it is foreseen that the person skilled in the art may wish to adjust said cut-off value in order to provide an assay of a particularly preferred sensitivity or specificity. Accordingly said cut-off value may be increased (thus increasing the specificity), said cut off value may be within a range selected form the group consisting of 0%-5%, 5%-10%, 10%-15%, 15%-20%, 20%-30% and 30%-50%. Particularly preferred are the cut-offs 10%, 15%, 25%, and 30%.

[0154] Upon determination of the methylation and/or expression of at least one gene or genomic sequence selected from the group consisting of AC051635.7, PRDM14, DMRT2, CYP1B1 and SOX1 and regulatory sequences thereof the presence or absence of cell proliferative disorders, preferably bladder carcinoma is determined, wherein hyper-methylation and/or under-expression indicates the presence of bladder carcinoma and hypo-methylation and/or over-expression indicates the absence of bladder carcinoma within the subject.

[0155] Further Improvements

[0156] The disclosed invention provides treated nucleic acids, derived from at least one genomic sequence, selected from a group comprising SEQ ID NO: 7, 1, 4, 10 and 13; preferably from SEQ ID NO: 8, 2, 5, 11, 14 and most preferably from SEQ ID NO: 9, 3, 6, 12, 15, wherein the treatment is suitable to convert at least one unmethylated cytosine base of the genomic DNA sequence to uracil or another base that is detectably dissimilar to cytosine in terms of hybridization. The genomic sequences in question may comprise one, or more consecutive methylated CpG positions. Said treatment preferably comprises use of a reagent selected from the group consisting of bisulfite, hydrogen sulfite, disulfite, and combinations thereof. In a preferred embodiment of the invention, the invention provides a non-naturally occurring modified nucleic acid comprising a sequence of at least 16 contiguous nucleotide bases in length of a sequence selected from the group consisting of SEQ ID NOS: 28, 29, 30, 31, 32, 33, 58, 59, 60, 61, 62, 63, 16, 17, 18, 19, 20, 21, 22, 23, 24, 25, 26, 27, 34, 35, 36, 37, 38, 39, 40, 41, 42, 43, 44, 45, 46, 47, 48, 49, 50, 51, 52, 53, 54, 55, 56, 57, 64, 65, 66, 67, 68, 69, 70, 71, 72, 73, 74, 75. In further preferred embodiments of the invention said nucleic acid is at least 50, 100, 150, 200, 250 or 500 base pairs in length of a segment of the nucleic acid sequence disclosed in SEQ ID NOS: 28, 29, 30, 31, 32, 33, 58, 59, 60, 61, 62, 63, 16, 17, 18, 19, 20, 21, 22, 23, 24, 25, 26, 27, 34, 35, 36, 37, 38, 39, 40, 41, 42, 43, 44, 45, 46, 47, 48, 49, 50, 51, 52, 53, 54, 55, 56, 57, 64, 65, 66, 67, 68, 69, 70, 71, 72, 73, 74, 75. Particularly preferred is a nucleic acid molecule that is not identical or complementary to all or a portion of the sequences SEQ ID NO: 28, 29, 30, 31, 32, 33, 58, 59, 60, 61, 62, 63, 16, 17, 18, 19, 20, 21, 22, 23, 24, 25, 26, 27, 34, 35, 36, 37, 38, 39, 40, 41, 42, 43, 44, 45, 46, 47, 48, 49, 50, 51, 52, 53, 54, 55, 56, 57, 64, 65, 66, 67, 68, 69, 70, 71, 72, 73, 74, 75 but not a genomic sequence, selected from a group comprising SEQ ID NO: 7, 1, 4, 10 and 13; preferably from SEQ ID NO: 8, 2, 5, 11, 14 and most preferably from SEQ ID NO: 9, 3, 6, 12, 15 or other naturally occurring DNA.

[0157] It is preferred that said sequence comprises at least one CpG, TpA or CpA dinucleotide and sequences complementary thereto. The sequences of SEQ ID NOS: 28, 29, 30, 31, 32, 33, 58, 59, 60, 61, 62, 63, 16, 17, 18, 19, 20, 21, 22, 23, 24, 25, 26, 27, 34, 35, 36, 37, 38, 39, 40, 41, 42, 43, 44, 45, 46, 47, 48, 49, 50, 51, 52, 53, 54, 55, 56, 57, 64, 65, 66, 67, 68, 69, 70, 71, 72, 73, 74, 75 provide non-naturally occurring modified versions of the nucleic acid according to at least one genomic sequence, selected from a group comprising SEQ ID NO: 7, 1, 4, 10 and 13; preferably from SEQ ID NO: 8, 2, 5, 11, 14 and most preferably from SEQ ID NO: 9, 3, 6, 12, 15, wherein the modification of each genomic sequence results in the synthesis of a nucleic acid having a sequence that is unique and distinct from said genomic sequence as follows. For each sense strand genomic DNA, e.g., derived from at least one genomic sequence, selected from a group comprising SEQ ID NO: 7, 1, 4, 10 and 13; preferably from SEQ ID NO: 8, 2, 5, 11, 14 and most preferably from SEQ ID NO: 9, 3, 6, 12, 15, four converted versions are disclosed. A first version wherein “C” is converted to “T,” but “CpG” remains “CpG” (i.e., corresponds to case where, for the genomic sequence, all “C” residues of CpG dinucleotide sequences are methylated and are thus not converted); a second version discloses the complement of the disclosed genomic DNA sequence (i.e. antisense strand), wherein “C” is converted to “T,” but “CpG” remains “CpG” (i.e., corresponds to case where, for all “C” residues of CpG dinucleotide sequences are methylated and are thus not converted). The ‘upmethylated’ converted sequences of at least one genomic sequence, selected from a group comprising SEQ ID NO: 7, 1, 4, 10 and 13; preferably from SEQ ID NO: 8, 2, 5, 11, 14 and most preferably from SEQ ID NO: 9, 3, 6, 12, 15 correspond to SEQ ID NOS: 16, 17, 18, 19, 20, 21, 22, 23, 24, 25, 26, 27, 28, 29, 30, 31, 32, 33, 34, 35, 36, 37, 38, 39, 40, 41, 42, 43, 44, 45. A third chemically converted version of each genomic sequences is provided, wherein “C” is converted to “T” for all “C” residues, including those of “CpG” dinucleotide sequences (i.e., corresponds to case where, for the genomic sequences, all “C” residues of CpG dinucleotide sequences are unmethylated); a final chemically converted version of each sequence, discloses the complement of the disclosed genomic DNA sequence (i.e. antisense strand), wherein “C” is converted to “T” for all “C” residues, including those of “CpG” dinucleotide sequences (i.e., corresponds to case where, for the complement (antisense strand) of each genomic sequence, all “C” residues of CpG dinucleotide sequences are unmethylated). The ‘downmethylated’ converted sequences of at least one genomic sequence, selected from a group comprising SEQ ID NO: 7, 1, 4, 10 and 13; preferably from SEQ ID NO: 8, 2, 5, 11, 14 and most preferably from SEQ ID NO: 9, 3, 6, 12, 15 corresponds to SEQ ID NOS: 46, 47, 48, 49, 50, 51, 52, 53, 54, 55, 56, 57, 58, 59, 60, 61, 62, 63, 64, 65, 66, 67, 68, 69, 70, 71, 72, 73, 74, 75.

[0158] Significantly, heretofore, the nucleic acid sequences and molecules according SEQ ID NOS: 28, 29, 30, 31, 32, 33, 58, 59, 60, 61, 62, 63, 16, 17, 18, 19, 20, 21, 22, 23, 24, 25, 26, 27, 34, 35, 36, 37, 38, 39, 40, 41, 42, 43, 44, 45, 46, 47, 48, 49, 50, 51, 52, 53, 54, 55, 56, 57, 64, 65, 66, 67, 68, 69, 70, 71, 72, 73, 74, 75 were not implicated in or connected with the detection or diagnosis of bladder carcinoma.

[0159] In an alternative preferred embodiment, the invention further provides oligonucleotides or oligomers suitable for use in the methods of the invention for detecting the cytosine methylation state within genomic or treated (chemically modified) DNA, according to SEQ ID NOS: 1, 2, 3, 4, 5, 6, 7, 8, 9, 10, 11, 12, 13, 14, 15, 28, 29, 30, 31, 32, 33, 58, 59, 60, 61, 62, 63, 16, 17, 18, 19, 20, 21, 22, 23, 24, 25, 26, 27, 34, 35, 36, 37, 38, 39, 40, 41, 42, 43, 44, 45, 46, 47, 48, 49, 50, 51, 52, 53, 54, 55, 56, 57, 64, 65, 66, 67, 68, 69, 70, 71, 72, 73, 74, 75 or to the complements thereof. Said oligonucleotide or oligomer nucleic acids provide novel diagnostic means. Said oligonucleotide or oligomer comprising a nucleic acid sequence having a length of at least nine (9) nucleotides which is identical to, hybridizes, under moderately stringent or stringent conditions (as defined herein above), to a treated nucleic acid sequence according to SEQ ID NOS: 28, 29, 30, 31, 32, 33, 58, 59, 60, 61, 62, 63, 16, 17, 18, 19, 20, 21, 22, 23, 24, 25, 26, 27, 34, 35, 36, 37, 38, 39, 40, 41, 42, 43, 44, 45, 46, 47, 48, 49, 50, 51, 52, 53, 54, 55, 56, 57, 64, 65, 66, 67, 68, 69, 70, 71, 72, 73, 74, 75 and/or sequences complementary thereto, or to a genomic sequence according to at least one genomic sequence, selected from a group comprising SEQ ID NO: 7, 1, 4, 10 and 13; preferably from SEQ ID NO: 8, 2, 5, 11, 14 and most preferably from SEQ ID NO: 9, 3, 6, 12, 15 and/or sequences complementary thereto.

[0160] Thus, the present invention includes nucleic acid molecules (e.g., oligonucleotides and peptide nucleic acid (PNA) molecules (PNA-oligomers)) that hybridize under moderately stringent and/or stringent hybridization conditions to all or a portion of the sequences SEQ ID NOS: 1, 2, 3, 4, 5, 6, 7, 8, 9, 10, 11, 12, 13, 14, 15, 28, 29, 30, 31, 32, 33, 58, 59, 60, 61, 62, 63, 16, 17, 18, 19, 20, 21, 22, 23, 24, 25, 26, 27, 34, 35, 36, 37, 38, 39, 40, 41, 42, 43, 44, 45, 46, 47, 48, 49, 50, 51, 52, 53, 54, 55, 56, 57, 64, 65, 66, 67, 68, 69, 70, 71, 72, 73, 74, 75 or to the complements thereof. Particularly preferred is a nucleic acid molecule that hybridizes under moderately stringent and/or stringent hybridization conditions to all or a portion of the sequences SEQ ID NOS: 28, 29, 30, 31, 32, 33, 58, 59, 60, 61, 62, 63, 16, 17, 18, 19, 20, 21, 22, 23, 24, 25, 26, 27, 34, 35, 36, 37, 38, 39, 40, 41, 42, 43, 44, 45, 46, 47, 48, 49, 50, 51, 52, 53, 54, 55, 56, 57, 64, 65, 66, 67, 68, 69, 70, 71, 72, 73, 74, 75 but not to a genomic sequence, selected from a group comprising SEQ ID NO: 7, 1, 4, 10 and 13; preferably from SEQ ID NO: 8, 2, 5, 11, 14 and most preferably from SEQ ID NO: 9, 3, 6, 12, 15 or other human genomic DNA.

[0161] The identical or hybridizing portion of the hybridizing nucleic acids is typically at least 9, 16, 20, 25, 30 or 35 nucleotides in length. However, longer molecules have inventive utility, and are thus within the scope of the present invention.

[0162] Preferably, the hybridizing portion of the inventive hybridizing nucleic acids is at least 95%, or at least 98%, or 100% identical to the sequence, or to a portion thereof of SEQ ID NOS: 1, 2, 3, 4, 5, 6, 7, 8, 9, 10, 11, 12, 13, 14, 15, 28, 29, 30, 31, 32, 33, 58, 59, 60, 61, 62, 63, 16, 17, 18, 19, 20, 21, 22, 23, 24, 25, 26, 27, 34, 35, 36, 37, 38, 39, 40, 41, 42, 43, 44, 45, 46, 47, 48, 49, 50, 51, 52, 53, 54, 55, 56, 57, 64, 65, 66, 67, 68, 69, 70, 71, 72, 73, 74, 75 or to the complements thereof.

[0163] Hybridizing nucleic acids of the type described herein can be used, for example, as a primer (e.g., a PCR primer), or a diagnostic probe or primer. Preferably, hybridization of the oligonucleotide probe to a nucleic acid sample is performed under stringent conditions and the probe is 100% identical to the target sequence. Nucleic acid duplex or hybrid stability is expressed as the melting temperature or Tm, which is the temperature at which a probe dissociates from a target DNA. This melting temperature is used to define the required stringency conditions.

[0164] For target sequences that are related and substantially identical to at least one genomic sequence, selected from a group comprising SEQ ID NO: 7, 1, 4, 10 and 13; preferably from SEQ ID NO: 8, 2, 5, 11, 14 and most preferably from SEQ ID NO: 9, 3, 6, 12, 15 (such as allelic variants and SN Ps), rather than identical, it is useful to first establish the lowest temperature at which only homologous hybridization occurs with a particular concentration of salt (e.g., SSC or SSPE). Then, assuming that 1% mismatching results in a 1° C. decrease in the Tm, the temperature of the final wash in the hybridization reaction is reduced accordingly (for example, if sequences having >95% identity with the probe are sought, the final wash temperature is decreased by 5° C.). In practice, the change in Tm can be between 0.5° C. and 1.5° C. per 1% mismatch.

[0165] Examples of inventive oligonucleotides of length X (in nucleotides), as indicated by polynucleotide positions with reference to, e.g., SEQ ID NO: 1, include those corresponding to sets (sense and antisense sets) of consecutively overlapping oligonucleotides of length X, where the oligonucleotides within each consecutively overlapping set (corresponding to a given X value) are defined as the finite set of Z oligonucleotides from nucleotide positions: n to (n+(X−1)); where n=1, 2, 3, . . . (Y−(X−1)); where Y equals the length (nucleotides or base pairs) of SEQ ID NO: 1 (3300); where X equals the common length (in nucleotides) of each oligonucleotide in the set (e.g., X=20 for a set of consecutively overlapping 20-mers); and where the number (Z) of consecutively overlapping oligomers of length X for a given SEQ ID NO: 1 of length Y is equal to Y−(X−1). For example Z=3300−19=3281 for either sense or antisense sets of SEQ ID NO: 1, where X=20.

[0166] Preferably, the set is limited to those oligomers that comprise at least one CpG, TpG or CpA dinucleotide.

[0167] Examples of inventive 20-mer oligonucleotides include the following set of 3281 oligomers (and the antisense set complementary thereto), indicated by polynucleotide positions with reference to SEQ ID NO 1: 1-20, 2-21, 3-22, 4-23, 5-24, . . . and 3281-3300.

[0168] Preferably, the set is limited to those oligomers that comprise at least one CpG, TpG or CpA dinucleotide.

[0169] Likewise, examples of inventive 25-mer oligonucleotides include the following set of 3276 oligomers (and the antisense set complementary thereto), indicated by polynucleotide positions with reference to SEQ ID NO 1: 1-25, 2-26, 3-27, 4-28, 5-29, . . . and 3276-3300.

[0170] Preferably, the set is limited to those oligomers that comprise at least one CpG, TpG or CpA dinucleotide.

[0171] The present invention encompasses, for each of SEQ ID NOS: 1, 2, 3, 4, 5, 6, 7, 8, 9, 10, 11, 12, 13, 14, 15, 16, 17, 18, 19, 20, 21, 22, 23, 24, 25, 26, 27, 28, 29, 30, 31, 32, 33, 34, 35, 36, 37, 38, 39, 40, 41, 42, 43, 44, 45, 46, 47, 48, 49, 50, 51, 52, 53, 54, 55, 56, 57, 58, 59, 60, 61, 62, 63, (sense and antisense), multiple consecutively overlapping sets of oligonucleotides or modified oligonucleotides of length X, where, e.g., X=9, 10, 17, 20, 22, 23, 25, 27, 30 or 35 nucleotides.

[0172] The oligonucleotides or oligomers according to the present invention constitute effective tools useful to ascertain genetic and epigenetic parameters of the genomic sequence corresponding to at least one genomic sequence, selected from a group comprising SEQ ID NO: 7, 1, 4, 10 and 13; preferably from SEQ ID NO: 8, 2, 5, 11, 14 and most preferably from SEQ ID NO: 9, 3, 6, 12, 15. Preferred sets of such oligonucleotides or modified oligonucleotides of length X are those consecutively overlapping sets of oligomers corresponding to SEQ ID NOS: 1, 2, 3, 4, 5, 6, 7, 8, 9, 10, 11, 12, 13, 14, 15, 16, 17, 18, 19, 20, 21, 22, 23, 24, 25, 26, 27, 28, 29, 30, 31, 32, 33, 34, 35, 36, 37, 38, 39, 40, 41, 42, 43, 44, 45, 46, 47, 48, 49, 50, 51, 52, 53, 54, 55, 56, 57, 58, 59, 60, 61, 62, 63, (and to the complements thereof). Preferably, said oligomers comprise at least one CpG, TpG or CpA dinucleotide.

[0173] Particularly preferred oligonucleotides or oligomers according to the present invention are those in which the cytosine of the CpG dinucleotide (or of the corresponding converted TpG or CpA dinculeotide) sequences is within the middle third of the oligonucleotide; that is, where the oligonucleotide is, for example, 13 bases in length, the CpG, TpG or CpA dinucleotide is positioned within the fifth to ninth nucleotide from the 5′-end.

[0174] The oligonucleotides of the invention can also be modified by chemically linking the oligonucleotide to one or more moieties or conjugates to enhance the activity, stability or detection of the oligonucleotide. Such moieties or conjugates include chromophores, fluorophors, lipids such as cholesterol, cholic acid, thioether, aliphatic chains, phospholipids, polyamines, polyethylene glycol (PEG), palmityl moieties, and others as disclosed in, for example, U.S. Pat. Nos. 5,514,758; 5,565,552; 5,567,810; 5,574,142; 5,585,481; 5,587,371; 5,597,696 and 5,958,773. The probes may also exist in the form of a PNA (peptide nucleic acid) which has particularly preferred pairing properties. Thus, the oligonucleotide may include other appended groups such as peptides, and may include hybridization-triggered cleavage agents (Krol et al., Bio Techniques 6:958-976, 1988) or intercalating agents (Zon, Pharm. Res. 5:539-549, 1988). To this end, the oligonucleotide may be conjugated to another molecule, e.g., a chromophore, fluorophor, peptide, hybridization-triggered cross-linking agent, transport agent, hybridization-triggered cleavage agent, etc.

[0175] The oligonucleotide may also comprise at least one art-recognized modified sugar and/or base moiety, or may comprise a modified backbone or non-natural internucleoside linkage.

[0176] The oligonucleotides or oligomers according to particular embodiments of the present invention are typically used in ‘sets,’ which contain at least one oligomer for analysis of each of the CpG dinucleotides of at least one genomic sequence selected from the group consisting of SEQ ID NO: 7, 1, 4, 10 and 13; preferably from SEQ ID NO: 8, 2, 5, 11, 14 and most preferably from SEQ ID NO: 9, 3, 6, 12, 15 and sequences complementary thereto, or to the corresponding CpG, TpG or CpA dinucleotide within a sequence of the treated nucleic acids according to SEQ ID NOS: 28, 29, 30, 31, 32, 33, 58, 59, 60, 61, 62, 63, 16, 17, 18, 19, 20, 21, 22, 23, 24, 25, 26, 27, 34, 35, 36, 37, 38, 39, 40, 41, 42, 43, 44, 45, 46, 47, 48, 49, 50, 51, 52, 53, 54, 55, 56, 57, 64, 65, 66, 67, 68, 69, 70, 71, 72, 73, 74, 75 and sequences complementary thereto. However, it is anticipated that for economic or other factors it may be preferable to analyse a limited selection of the CpG dinucleotides within said sequences, and the content of the set of oligonucleotides is altered accordingly.

[0177] Therefore, in particular embodiments, the present invention provides a set of at least two (2) (oligonucleotides and/or PNA-oligomers) useful for detecting the cytosine methylation state in treated genomic DNA (SEQ ID NOS: 28, 29, 30, 31, 32, 33, 58, 59, 60, 61, 62, 63, 16, 17, 18, 19, 20, 21, 22, 23, 24, 25, 26, 27, 34, 35, 36, 37, 38, 39, 40, 41, 42, 43, 44, 45, 46, 47, 48, 49, 50, 51, 52, 53, 54, 55, 56, 57, 64, 65, 66, 67, 68, 69, 70, 71, 72, 73, 74, 75), or in genomic DNA (at least one genomic sequence, selected from a group comprising SEQ ID NO: 7, 1, 4, 10 and 13; preferably from SEQ ID NO: 8, 2, 5, 11, 14 and most preferably from SEQ ID NO: 9, 3, 6, 12, 15 and sequences complementary thereto). These probes enable diagnosis and detection of bladder carcinoma. The set of oligomers may also be used for detecting single nucleotide polymorphisms (SNPs) in treated genomic DNA (SEQ ID NOS: 28, 29, 30, 31, 32, 33, 58, 59, 60, 61, 62, 63, 16, 17, 18, 19, 20, 21, 22, 23, 24, 25, 26, 27, 34, 35, 36, 37, 38, 39, 40, 41, 42, 43, 44, 45, 46, 47, 48, 49, 50, 51, 52, 53, 54, 55, 56, 57, 64, 65, 66, 67, 68, 69, 70, 71, 72, 73, 74, 75), or in genomic DNA (at least one genomic sequence, selected from a group comprising SEQ ID NO: 7, 1, 4, 10 and 13; preferably from SEQ ID NO: 8, 2, 5, 11, 14 and most preferably from SEQ ID NO: 9, 3, 6, 12, 15 and sequences complementary thereto).

[0178] In preferred embodiments, at least one, and more preferably all members of a set of oligonucleotides is bound to a solid phase.

[0179] In further embodiments, the present invention provides a set of at least two (2) oligonucleotides that are used as ‘primer’ oligonucleotides for amplifying DNA sequences of one of SEQ ID NOS: 1, 2, 3, 4, 5, 6, 7, 8, 9, 10, 11, 12, 13, 14, 15, 16, 17, 18, 19, 20, 21, 22, 23, 24, 25, 26, 27, 28, 29, 30, 31, 32, 33, 34, 35, 36, 37, 38, 39, 40, 41, 42, 43, 44, 45, 46, 47, 48, 49, 50, 51, 52, 53, 54, 55, 56, 57, 58, 59, 60, 61, 62, 63, and sequences complementary thereto, or segments thereof.

[0180] It is anticipated that the oligonucleotides may constitute all or part of an “array” or “DNA chip” (i.e., an arrangement of different oligonucleotides and/or PNA-oligomers bound to a solid phase). Such an array of different oligonucleotide- and/or PNA-oligomer sequences can be characterized, for example, in that it is arranged on the solid phase in the form of a rectangular or hexagonal lattice. The solid-phase surface may be composed of silicon, glass, polystyrene, aluminium, steel, iron, copper, nickel, silver, or gold. Nitrocellulose as well as plastics such as nylon, which can exist in the form of pellets or also as resin matrices, may also be used. An overview of the Prior Art in oligomer array manufacturing can be gathered from a special edition of Nature Genetics (Nature Genetics Supplement, Volume 21, January 1999, and from the literature cited therein). Fluorescently labelled probes are often used for the scanning of immobilized DNA arrays. The simple attachment of Cy3 and Cy5 dyes to the 5′-OH of the specific probe are particularly suitable for fluorescence labels. The detection of the fluorescence of the hybridised probes may be carried out, for example, via a confocal microscope. Cy3 and Cy5 dyes, besides many others, are commercially available.

[0181] It is also anticipated that the oligonucleotides, or particular sequences thereof, may constitute all or part of an “virtual array” wherein the oligonucleotides, or particular sequences thereof, are used, for example, as ‘specifiers’ as part of, or in combination with a diverse population of unique labeled probes to analyze a complex mixture of analytes. Such a method, for example is described in US 2003/0013091 (U.S. Ser. No. 09/898,743, published 16 Jan. 2003). In such methods, enough labels are generated so that each nucleic acid in the complex mixture (i.e., each analyte) can be uniquely bound by a unique label and thus detected (each label is directly counted, resulting in a digital read-out of each molecular species in the mixture).

[0182] It is particularly preferred that the oligomers according to the invention are utilised for detecting, or for diagnosing bladder carcinoma.

[0183] Kits

[0184] Moreover, an additional aspect of the present invention is a kit comprising: a means for determining methylation of at least one gene or genomic sequence selected from the group consisting of AC051635.7, PRDM14, DMRT2, CYP1B1 and SOX1 and regulatory sequences thereof. The means for determining methylation of at least one gene or genomic sequence selected from the group consisting of AC051635.7, PRDM14, DMRT2, CYP1B1 and SOX1 and regulatory sequences thereof comprise preferably a bisulfite-containing reagent; one or a plurality of oligonucleotides consisting whose sequences in each case are identical, are complementary, or hybridise under stringent or highly stringent conditions to a 9 or more preferably 18 base long segment of a sequence selected from SEQ ID NOS: 28, 29, 30, 31, 32, 33, 58, 59, 60, 61, 62, 63, 16, 17, 18, 19, 20, 21, 22, 23, 24, 25, 26, 27, 34, 35, 36, 37, 38, 39, 40, 41, 42, 43, 44, 45, 46, 47, 48, 49, 50, 51, 52, 53, 54, 55, 56, 57, 64, 65, 66, 67, 68, 69, 70, 71, 72, 73, 74, 75; and optionally instructions for carrying out and evaluating the described method of methylation analysis. In one embodiment the base sequence of said oligonucleotides comprises at least one CpG, CpA or TpG dinucleotide.

[0185] In a further embodiment, said kit may further comprise standard reagents for performing a CpG position-specific methylation analysis, wherein said analysis comprises one or more of the following techniques: MS-SNuPE, MSP, MethyLight™, HeavyMethyl, COBRA, and nucleic acid sequencing. However, a kit along the lines of the present invention can also contain only part of the aforementioned components.

[0186] In a preferred embodiment the kit may comprise additional bisulfite conversion reagents selected from the group consisting: DNA denaturation buffer; sulfonation buffer; DNA recovery reagents or kits (e.g., precipitation, ultrafiltration, affinity column); desulfonation buffer; and DNA recovery components.

[0187] In a further alternative embodiment, the kit may contain, packaged in separate containers, a polymerase and a reaction buffer optimised for primer extension mediated by the polymerase, such as PCR. In another embodiment of the invention the kit further comprising means for obtaining a biological sample of the patient. Preferred is a kit, which further comprises a container suitable for containing the means for determining methylation of at least one gene or genomic sequence selected from the group consisting of AC051635.7, PRDM14, DMRT2, CYP1B1 and SOX1 and regulatory sequences thereof in the biological sample of the patient, and most preferably further comprises instructions for use and interpretation of the kit results. In a preferred embodiment the kit comprises: (a) a bisulfite reagent; (b) a container suitable for containing the said bisulfite reagent and the biological sample of the patient; (c) at least one set of primer oligonucleotides containing two oligonucleotides whose sequences in each case are identical, are complementary, or hybridise under stringent or highly stringent conditions to a 9 or more preferably 18 base long segment of a sequence selected from SEQ ID NOS: 28, 29, 30, 31, 32, 33, 58, 59, 60, 61, 62, 63, 16, 17, 18, 19, 20, 21, 22, 23, 24, 25, 26, 27, 34, 35, 36, 37, 38, 39, 40, 41, 42, 43, 44, 45, 46, 47, 48, 49, 50, 51, 52, 53, 54, 55, 56, 57, 64, 65, 66, 67, 68, 69, 70, 71, 72, 73, 74, 75; and optionally (d) instructions for use and interpretation of the kit results. In an alternative preferred embodiment the kit comprises: (a) a bisulfite reagent; (b) a container suitable for containing the said bisulfite reagent and the biological sample of the patient; (c) at least one oligonucleotides and/or PNA-oligomer having a length of at least 9 or 16 nucleotides which is identical to or hybridises to a pre-treated nucleic acid sequence according to one of SEQ ID NOS: 28, 29, 30, 31, 32, 33, 58, 59, 60, 61, 62, 63, 16, 17, 18, 19, 20, 21, 22, 23, 24, 25, 26, 27, 34, 35, 36, 37, 38, 39, 40, 41, 42, 43, 44, 45, 46, 47, 48, 49, 50, 51, 52, 53, 54, 55, 56, 57, 64, 65, 66, 67, 68, 69, 70, 71, 72, 73, 74, 75 and sequences complementary thereto; and optionally (d) instructions for use and interpretation of the kit results.

[0188] In an alternative embodiment the kit comprises: (a) a bisulfite reagent; (b) a container suitable for containing the said bisulfite reagent and the biological sample of the patient; (c) at least one set of primer oligonucleotides containing two oligonucleotides whose sequences in each case are identical, are complementary, or hybridise under stringent or highly stringent conditions to a 9 or more preferably 18 base long segment of a sequence selected from SEQ ID NOS: 28, 29, 30, 31, 32, 33, 58, 59, 60, 61, 62, 63, 16, 17, 18, 19, 20, 21, 22, 23, 24, 25, 26, 27, 34, 35, 36, 37, 38, 39, 40, 41, 42, 43, 44, 45, 46, 47, 48, 49, 50, 51, 52, 53, 54, 55, 56, 57, 64, 65, 66, 67, 68, 69, 70, 71, 72, 73, 74, 75; (d) at least one oligonucleotides and/or PNA-oligomer having a length of at least 9 or 16 nucleotides which is identical to or hybridises to a pre-treated nucleic acid sequence according to one of SEQ ID NOS: 28, 29, 30, 31, 32, 33, 58, 59, 60, 61, 62, 63, 16, 17, 18, 19, 20, 21, 22, 23, 24, 25, 26, 27, 34, 35, 36, 37, 38, 39, 40, 41, 42, 43, 44, 45, 46, 47, 48, 49, 50, 51, 52, 53, 54, 55, 56, 57, 64, 65, 66, 67, 68, 69, 70, 71, 72, 73, 74, 75 and sequences complementary thereto; and optionally (e) instructions for use and interpretation of the kit results.

[0189] The kit may also contain other components such as buffers or solutions suitable for blocking, washing or coating, packaged in a separate container.

[0190] Another aspect of the invention relates to a kit for use in determining the presence of and/or diagnosing bladder carcinoma, said kit comprising: a means for measuring the level of transcription of at least one gene or genomic sequence selected from the group consisting of AC051635.7, PRDM14, DMRT2, CYP1B1 and SOX1 and regulatory sequences thereof and a means for determining at least one gene or genomic sequence selected from the group consisting of AC051635.7, PRDM14, DMRT2, CYP1B1 and SOX1 and regulatory sequences thereof methylation.

[0191] Typical reagents (e.g., as might be found in a typical COBRA™-based kit) for COBRA™ analysis may include, but are not limited to: PCR primers for at least one gene or genomic sequence selected from the group consisting of AC051635.7, PRDM14, DMRT2, CYP1B1 and SOX1 and regulatory sequences thereof restriction enzyme and appropriate buffer; gene-hybridization oligo; control hybridization oligo; kinase labeling kit for oligo probe; and labeled nucleotides. Typical reagents (e.g., as might be found in a typical MethyLight™-based kit) for MethyLight™ analysis may include, but are not limited to: PCR primers for the bisulfite converted sequence of at least one gene or genomic sequence selected from the group consisting of AC051635.7, PRDM14, DMRT2, CYP1B1 and SOX1 and regulatory sequences thereof bisulfite specific probes (e.g. TaqMan™ or Lightcycler™); optimized PCR buffers and deoxynucleotides; and Taq polymerase.

[0192] Typical reagents (e.g., as might be found in a typical Ms-SNuPE™-based kit) for Ms-SNuPE™ analysis may include, but are not limited to: PCR primers for specific gene (or bisulfite treated DNA sequence or CpG island); optimized PCR buffers and deoxynucleotides; gel extraction kit; positive control primers; Ms-SNuPE™ primers for the bisulfite converted sequence of at least one gene or genomic sequence selected from the group consisting of AC051635.7, PRDM14, DMRT2, CYP1 B1 and SOX1 and regulatory sequences thereof reaction buffer (for the Ms-SNuPE reaction); and labelled nucleotides.

[0193] Typical reagents (e.g., as might be found in a typical MSP-based kit) for MSP analysis may include, but are not limited to: methylated and unmethylated PCR primers for the bisulfite converted sequence of at least one gene or genomic sequence selected from the group consisting of AC051635.7, PRDM14, DMRT2, CYP1B1 and SOX1 and regulatory sequences thereof, optimized PCR buffers and deoxynucleotides, and specific probes.

[0194] Moreover, an additional aspect of the present invention is an alternative kit comprising a means for determining at least one gene or genomic sequence selected from the group consisting of AC051635.7, PRDM14, DMRT2, CYP1B1 and SOX1 and regulatory sequences thereof methylation, wherein said means comprise preferably at least one methylation specific restriction enzyme; one or a plurality of primer oligonucleotides (preferably one or a plurality of primer pairs) suitable for the amplification of a sequence comprising at least one CpG dinucleotide of at least one genomic sequence, selected from a group comprising SEQ ID NO: 7, 1, 4, 10 and 13; preferably from SEQ ID NO: 8, 2, 5, 11, 14 and most preferably from SEQ ID NO: 9, 3, 6, 12, 15; and optionally instructions for carrying out and evaluating the described method of methylation analysis. In one embodiment the base sequence of said oligonucleotides are identical, are complementary, or hybridise under stringent or highly stringent conditions to an at least 18 base long segment of at least one sequence selected from a group comprising SEQ ID NO: 7, 1, 4, 10 and 13; preferably from SEQ ID NO: 8, 2, 5, 11, 14 and most preferably from SEQ ID NO: 9, 3, 6, 12, 15.

[0195] In a further embodiment said kit may comprise one or a plurality of oligonucleotide probes for the analysis of the digest fragments, preferably said oligonucleotides are identical, are complementary, or hybridise under stringent or highly stringent conditions to an at least 16 base long segment of at least one sequence selected from a group comprising SEQ ID NO: 7, 1, 4, 10 and 13; preferably from SEQ ID NO: 8, 2, 5, 11, 14 and most preferably from SEQ ID NO: 9, 3, 6, 12, 15.

[0196] In a preferred embodiment the kit may comprise additional reagents selected from the group consisting: buffer (e.g. restriction enzyme, PCR, storage or washing buffers); DNA recovery reagents or kits (e.g., precipitation, ultrafiltration, affinity column) and DNA recovery components.

[0197] In a further alternative embodiment, the kit may contain, packaged in separate containers, a polymerase and a reaction buffer optimised for primer extension mediated by the polymerase, such as PCR. In another embodiment of the invention the kit further comprising means for obtaining a biological sample of the patient. In a preferred embodiment the kit comprises: (a) a methylation sensitive restriction enzyme reagent; (b) a container suitable for containing the said reagent and the biological sample of the patient; (c) at least one set of oligonucleotides one or a plurality of nucleic acids or peptide nucleic acids which are identical, are complementary, or hybridise under stringent or highly stringent conditions to an at least 9 base long segment of at least one sequence selected from a group comprising SEQ ID NO: 7, 1, 4, 10 and 13; preferably from SEQ ID NO: 8, 2, 5, 11, 14 and most preferably from SEQ ID NO: 9, 3, 6, 12, 15; and optionally (d) instructions for use and interpretation of the kit results.

[0198] In an alternative preferred embodiment the kit comprises: (a) a methylation sensitive restriction enzyme reagent; (b) a container suitable for containing the said reagent and the biological sample of the patient; (c) at least one set of primer oligonucleotides suitable for the amplification of a sequence comprising at least one CpG dinucleotide of a sequence selected from at least one genomic sequence, selected from a group comprising SEQ ID NO: 7, 1, 4, 10 and 13; preferably from SEQ ID NO: 8, 2, 5, 11, 14 and most preferably from SEQ ID NO: 9, 3, 6, 12, 15; and optionally (d) instructions for use and interpretation of the kit results.

[0199] In an alternative embodiment the kit comprises: (a) a methylation sensitive restriction enzyme reagent; (b) a container suitable for containing the said reagent and the biological sample of the patient; (c) at least one set of primer oligonucleotides suitable for the amplification of a sequence comprising at least one CpG dinucleotide of a sequence selected from at least one genomic sequence, selected from a group comprising SEQ ID NO: 7, 1, 4, 10 and 13; preferably from SEQ ID NO: 8, 2, 5, 11, 14 and most preferably from SEQ ID NO: 9, 3, 6, 12, 15; (d) at least one set of oligonucleotides one or a plurality of nucleic acids or peptide nucleic acids which are identical, are complementary, or hybridise under stringent or highly stringent conditions to an at least 9 base long segment of a sequence selected from at least one genomic sequence, selected from a group comprising SEQ ID NO: 7, 1, 4, 10 and 13; preferably from SEQ ID NO: 8, 2, 5, 11, 14 and most preferably from SEQ ID NO: 9, 3, 6, 12, 15 and optionally (e) instructions for use and interpretation of the kit results.

[0200] The kit may also contain other components such as buffers or solutions suitable for blocking, washing or coating, packaged in a separate container.

[0201] The invention further relates to a kit for use in providing a diagnosis of the presence or absence of bladder carcinoma, in a subject by means of methylation-sensitive restriction enzyme analysis. Said kit comprises a container and a DNA microarray component. Said DNA microarray component being a surface upon which a plurality of oligonucleotides are immobilized at designated positions and wherein the oligonucleotide comprises at least one CpG methylation site. At least one of said oligonucleotides is specific for at least one gene or genomic sequence selected from the group consisting of AC051635.7, PRDM14, DMRT2, CYP1B1 and SOX1 and regulatory sequences thereof and comprises a sequence of at least 15 base pairs in length but no more than 200 bp of a sequence according to at least one genomic sequence, selected from a group comprising SEQ ID NO: 7, 1, 4, 10 and 13; preferably from SEQ ID NO: 8, 2, 5, 11, 14 and most preferably from SEQ ID NO: 9, 3, 6, 12, 15. Preferably said sequence is at least 15 base pairs in length but no more than 80 bp of at least one sequence according to one of SEQ ID NO: 7, 1, 4, 10 and 13; preferably from SEQ ID NO: 8, 2, 5, 11, 14 and most preferably from SEQ ID NO: 9, 3, 6, 12, 15. It is further preferred that said sequence is at least 20 base pairs in length but no more than 30 bp of a sequence according to least one sequence according to one of SEQ ID NO: 7, 1, 4, 10 and 13; preferably from SEQ ID NO: 8, 2, 5, 11, 14 and most preferably from SEQ ID NO: 9, 3, 6, 12, 15.

[0202] Said test kit preferably further comprises a restriction enzyme component comprising one or a plurality of methylation-sensitive restriction enzymes.

[0203] In a further embodiment said test kit is further characterized in that it comprises at least one methylation-specific restriction enzyme, and wherein the oligonucleotides comprise a restriction site of said at least one methylation specific restriction enzymes.

[0204] The kit may further comprise one or several of the following components, which are known in the art for DNA enrichment: a protein component, said protein binding selectively to methylated DNA; a triplex-forming nucleic acid component, one or a plurality of linkers, optionally in a suitable solution; substances or solutions for performing a ligation e.g. ligases, buffers; substances or solutions for performing a column chromatography; substances or solutions for performing an immunology based enrichment (e.g. immunoprecipitation); substances or solutions for performing a nucleic acid amplification e.g. PCR; a dye or several dyes, if applicable with a coupling reagent, if applicable in a solution; substances or solutions for performing a hybridization; and/or substances or solutions for performing a washing step.

[0205] The described invention further provides a composition of matter useful for detecting, or for diagnosing bladder carcinoma. Said composition comprising at least one nucleic acid 18 base pairs in length of a segment of the nucleic acid sequence disclosed in SEQ ID NOS: 28, 29, 30, 31, 32, 33, 58, 59, 60, 61, 62, 63, 16, 17, 18, 19, 20, 21, 22, 23, 24, 25, 26, 27, 34, 35, 36, 37, 38, 39, 40, 41, 42, 43, 44, 45, 46, 47, 48, 49, 50, 51, 52, 53, 54, 55, 56, 57, 64, 65, 66, 67, 68, 69, 70, 71, 72, 73, 74, 75, and one or more substances taken from the group comprising: 1-5 mM Magnesium Chloride, 100-500 μM dNTP, 0.5-5 units of taq polymerase, bovine serum albumen, an oligomer in particular an oligonucleotide or peptide nucleic acid (PNA)-oligomer, said oligomer comprising in each case at least one base sequence having a length of at least 9 nucleotides which is complementary to, or hybridizes under moderately stringent or stringent conditions to a pretreated genomic DNA according to one of the SEQ ID NOS: 28, 29, 30, 31, 32, 33, 58, 59, 60, 61, 62, 63, 16, 17, 18, 19, 20, 21, 22, 23, 24, 25, 26, 27, 34, 35, 36, 37, 38, 39, 40, 41, 42, 43, 44, 45, 46, 47, 48, 49, 50, 51, 52, 53, 54, 55, 56, 57, 64, 65, 66, 67, 68, 69, 70, 71, 72, 73, 74, 75 and sequences complementary thereto. It is preferred that said composition of matter comprises a buffer solution appropriate for the stabilization of said nucleic acid in an aqueous solution and enabling polymerase based reactions within said solution. Suitable buffers are known in the art and commercially available.

[0206] In further preferred embodiments of the invention said at least one nucleic acid is at least 50, 100, 150, 200, 250 or 500 base pairs in length of a segment of the nucleic acid sequence disclosed in SEQ ID NOS: 28, 29, 30, 31, 32, 33, 58, 59, 60, 61, 62, 63, 16, 17, 18, 19, 20, 21, 22, 23, 24, 25, 26, 27, 34, 35, 36, 37, 38, 39, 40, 41, 42, 43, 44, 45, 46, 47, 48, 49, 50, 51, 52, 53, 54, 55, 56, 57, 64, 65, 66, 67, 68, 69, 70, 71, 72, 73, 74, 75.

### DESCRIPTION OF FIGURES

[0207] FIG. 1 shows the results from the technical evaluation of MSP assays. mDNA=fully methylated DNA, MDA=Multiple Displacement Amplification; this results in fully unmethylated DNA; a 1:1000 mixture of methylated in unmethylated DNA is used for assessing the relative sensitivity. USED=urine sediment pool. 3 pools with DNA from 3 to 5 different healthy people were analysed, therefore each pool represents a unique sample; NTCs=No template controls, samples which must be negative; Pat1-5: bladder tumour tissue samples which were used in DMH, therefore a positive assay performance on these samples provides confirmation of the DMH results. The values are qPCR data shown as Crossing Points (CPs). A CP of 50 means no methylated DNA detected; smaller correspond to increasing amounts of methylated DNA detected by the respective assay.

[0208] FIG. 2 shows the ratios of methylated versus total DNA within whole urine specimen obtained from healthy (crtl) individuals and from patients diagnosed with bladder carcinoma (cancer). Methylation was detected within PCR products (SEQ ID NOS: 84, 76, 80, 88, 92), each of which represents a sequence fragment of the genes indicated.

### EXAMPLES

[0209] 1. Introduction

[0210] A reliable and non-invasive diagnosis of recurrent bladder carcinoma remains a challenge for the clinical practice. We employed differential methylation hybridisation (DMH) as methodology to discover DNA methylation-based biomarkers which are suitable for the early diagnosis of non-muscle invasive bladder carcinoma. Tumour tissue and DNA from urine sediments of healthy people was chosen as sample material for the discovery. Genomic loci identified as differentially methylated were filtered to select those candidates which are hypermethylated in tumour and predominantly unmethylated in the DNA derived from urine sediment of healthy people as well as in normal peripheral blood lymphocytes.

[0211] For a subgroup of these marker candidates we developed methylation specific PCR (MSP) assays to validate the findings from this discovery study. The best performing assays were finally tested on a collection of urine samples from patients with non-muscle invasive bladder carcinoma and patients free of bladder carcinoma.

[0212] Detailed results are shown for five marker candidates which are suitable for further assay development in order to obtain clinically useful tools for non-invasive and early diagnosis of bladder carcinoma.

[0213] 2. Methods

[0214] 2.1. Differential Methylation Hybridisation

[0215] Samples: Bladder carcinoma tumour tissue from six patients with a tumour cell content of 70 percent or more was chosen as one test group; DNA extracted from urine sediment samples from seven healthy people as the control group.

[0216] DMH: A whole genome library was prepared using methylation unspecific digestion, followed by adapter ligation and a methylation sensitive restriction digest. Amplification with primers matching the generic adapters yielded an amplificate which was subsequently hybridized to a microarray covering more than 50,000 genomic loci. Each sample was processed twice independently and hybridized to two arrays.

[0217] Analysis: Data were quality controlled using on-chip control oligos and additional quality criteria; chips of each sample that passed the quality controls were averaged and normalised based on technical samples with known methylation status. Potential biomarker candidates were selected based on effect size and intra group variation between individual loci of the two groups. A detailed description of the DMH technology is provided by FassbenderA. et al., Humana Press.

[0218] Methods in Molecular Medicine. 2009, Christian Pilarsky and Robert Grützmann (Editor) ISBN: 978-1-934115-76-3 and by Lewin J. et al., Int J Biochem Cell Biol. 2007;39(7-8):1539-50. Candidate markers hypermethylated in tumour and predominantly unmethylated in healthy urine sediment as well as in normal peripheral blood lymphocytes were tagged with higher scores versus loci displaying other patterns of differential methylation.

[0219] 2.2. Methylation Specific PCR Assays

[0220] Technical evaluation: 62 real time MSP assays were developed for the top scoring DMH loci. Most assays were designed with two primer pairs which allowed to select the better performing primer pairs.

[0221] All assays were then subjected to a testing scheme which was designed to allow:
[0222] Assessment of assay performance using technical samples
   [0223] Minimum requirement: Detection of at least 50pg methylated DNA absolute and relative sensitivities, i.e. 50 pg methylated DNA in a background of 50 ng of unmethylated DNA.
[0224] Estimation of background methylation in biological controls
   [0225] Minimum requirement: Methylation levels in pooled samples of healthy urine sediment and peripheral blood lymphocyte DNA was expected to differ by 2 crossing points compared to technical samples with methylated DNA
[0226] Verification of DMH results for the respective locus
   [0227] Minimum requirement: Positive assay response in at least 70% of tumour tissue samples Evaluation on Clinical Samples: Only assays with sufficient technical performance and acceptable background methylation levels on biological controls were selected for analysis on clinical urine samples. Of the 62 assays 8 assays were selected for further analysis. These assays were used to analyse whole urine samples from 20 bladder carcinoma patients, newly diagnosed or relapses, and 22 control samples, including cases with a history of bladder carcinoma.

[0228] All extracted DNA were subjected to bisulfite treatment, using protocols developed at Epigenomics. Real time PCRs were analysed on the ABI 7300 TaqMan platform. Total amounts of amplifiable DNA were quantified using a methylation unspecific assay.

[0229] 3. Results

[0230] An overview of the technical evaluation of the MSP assays and the results from five assays is shown in FIG. 1.

[0231] With those assays which could verify the methylation difference initially found by DMH on tumour tissue, elevated DNA methylation levels were also found in urine specimen. The sensitivities achieved with these research assays ranged from 40% to 65%. However, all targeted loci would allow refined assay designs which may allow to significantly improve assay sensitivities and specificities. In addition, the combination of assays in panels seems to be promising with regards to the results obtained so far.

[0232] 4. Conclusions
[0233] New biomarkers with the potential for clinical applicability in bladder carcinoma diagnosis were discovered using DMH technology.
[0234] DNA methylation levels were found to be significantly higher in most urine samples from cancer patients as compared to samples from cancer free individuals.

TABLE 1
Genomic Sequences (SEQ ID NOS)

| | | | More | Most |
|---|---|---|---|---|
| | | Preferred | preferred | preferred |
| Gene or | | genomic | genomic | genomic |
| Genomic | Genomic | Region | region | region (DMH |
| Sequence | Sequence | (ROI ± 300 bp) | (ROI) | Fragment) |
| AC051635.7 | 96 | 7 | 8 | 9 |
| PRDM14 | 97 | 1 | 2 | 3 |
| DMRT2 | 98 | 4 | 5 | 6 |
| CYP1B1 | 99 | 10 | 11 | 12 |
| SOX1 | 100 | 13 | 14 | 15 |

TABLE 2
Methylated Bisulphite-converted (SEQ ID NOS)

| | | | Preferred | | | | Most preferred | Most preferred |
|---|---|---|---|---|---|---|---|---|
| | | | genomic | Preferred genomic | More preferred | More preferred | genomic region | genomic region |
| | Genomic | Genomic | Region | Region | genomic | genomic | (DMH | (DMH |
| Gene or | Sequence | Sequence | (ROI ± 300 bp) | (ROI ± 300 bp) | region (ROI) | region (ROI) | Fragment) | Fragment) |
| Genomic | Methylated | Methylated | Methylated | Methylated | Methylated | Methylated | Methylated | Methylated |
| Sequence | (sense) | (antisense) | (sense) | (antisense) | (sense) | (antisense) | (sense) | (antisense) |
| AC051635.7 | 101 | 102 | 28 | 29 | 30 | 31 | 32 | 33 |
| PRDM14 | 103 | 104 | 16 | 17 | 18 | 19 | 20 | 21 |
| DMRT2 | 105 | 106 | 22 | 23 | 24 | 25 | 26 | 27 |
| CYP1B1 | 107 | 108 | 34 | 35 | 36 | 37 | 38 | 39 |
| SOX1 | 109 | 110 | 40 | 41 | 42 | 43 | 44 | 45 |

TABLE 3
Unmethylated Bisulphite-converted Sequences (SEQ ID NOS)

| | | | | | | | | Most preferred |
|---|---|---|---|---|---|---|---|---|
| | | | Preferred | Preferred | More preferred | More preferred | Most preferred | genomic |
| | | | genomic | genomic | genomic | genomic | genomic | region |
| | Genomic | Genomic | Region | Region | region | region | region | (DMH |
| Gene or | Sequence | Sequence | (ROI ± 300 bp) | (ROI ± 300 bp) | (ROI) | (ROI) | (DMH Fragment) | Fragment) |
| Genomic | Unmethylated | Unmethylated | Unmethylated | Unmethylated | Unmethylated | Unmethylated | Unmethylated | Unmethylated |
| Sequence | (sense) | (antisense) | (sense) | (antisense) | (sense) | (antisense) | (sense) | (antisense) |
| AC051635.7 | 111 | 112 | 58 | 59 | 60 | 61 | 62 | 63 |
| PRDM14 | 113 | 114 | 46 | 47 | 48 | 49 | 50 | 51 |
| DMRT2 | 115 | 116 | 52 | 53 | 54 | 55 | 56 | 57 |
| CYP1B1 | 117 | 118 | 64 | 65 | 66 | 67 | 68 | 69 |
| SOX1 | 119 | 120 | 70 | 71 | 72 | 73 | 74 | 75 |

1. A method for detecting bladder carcinoma comprising determining the methylation status and/or the expression level of at least one gene or genomic sequence, selected from the group consisting of SEQ ID NO: 96, SEQ ID NO: 97, SEQ ID NO: 98, SEQ ID NO: 99 and SEQ ID NO: 100 and regulatory sequences thereof in a biological sample isolated from a subject, wherein hyper-methylation and/or under-expression is indicative of the presence of said disorder.

2. The method according to claim 1 wherein said expression level is determined by detecting the presence, absence or level of mRNA transcribed from said gene.

3. The method according to claim 1 wherein said expression level is determined by detecting the presence, absence or level of a polypeptide encoded by said gene or sequence thereof.

4. The method according to claim 3 wherein said polypeptide is detected by one or more means selected from the group comprising western blot analysis, chromatography, immunoassay, ELISA immunoassay, radioimmunoassay, antibody and combinations thereof.

5. A method according to claim 1, comprising contacting genomic DNA isolated from a biological sample obtained from said subject with at least one reagent, or series of reagents that distinguishes between methylated and non-methylated CpG dinucleotides within at least one target region of the genomic DNA, wherein the target region comprises, or hybridizes under stringent conditions to a sequence of at least 16 contiguous nucleotides of SEQ ID NO: 1 respectively, wherein said contiguous nucleotides comprise at least one CpG dinucleotide sequence, and whereby detecting bladder carcinoma is, at least in part, afforded.

6. A method according to claim 1, comprising:
a. extracting or otherwise isolating genomic DNA from a biological sample obtained from the subject;
b. treating the genomic DNA of a), or a fragment thereof, with one or more reagents to convert cytosine bases that are unmethylated in the 5-position thereof to uracil or to another base that is detectably dissimilar to cytosine in terms of hybridization properties;
c. contacting the treated genomic DNA, or the treated fragment thereof, with an amplification enzyme and at least one primer comprising a contiguous sequence of at least 9 nucleotides that is complementary to, or hybridizes under moderately stringent or stringent conditions to a sequence selected from the group consisting of SEQ ID NOS: 28, 29, 30, 31, 32, 33, 58, 59, 60, 61, 62, 63, 16, 17, 18, 19, 20, 21, 22, 23, 24, 25, 26, 27, 34, 35, 36, 37, 38, 39, 40, 41, 42, 43, 44, 45, 46, 47, 48, 49, 50, 51, 52, 53, 54, 55, 56, 57, 64, 65, 66, 67, 68, 69, 70, 71, 72, 73, 74, 75 and complements thereof, wherein the treated genomic DNA or the fragment thereof is either amplified to produce at least one amplificate, or is not amplified; and
d. determining, based on a presence or absence of, or on a property of said amplificate, the methylation state or level of at least one CpG dinucleotide of at least one genomic sequence, selected from a group comprising SEQ ID NO: 7, 1, 4, 10 and 13; preferably from SEQ ID NO: 8, 2, 5, 11, 14 and most preferably from SEQ ID NO: 9, 3, 6, 12, 15, or an average, or a value reflecting an average methylation state or level of a plurality of CpG dinucleotides of at least one of said genomic sequences, whereby at least one of detecting and diagnosing bladder carcinoma is, at least in part, afforded.

7. The method of claim 6, wherein treating the genomic DNA or the fragment thereof in b), comprises use of a reagent selected from the group comprising of bisulfite, hydrogen sulfite, disulfite, and combinations thereof.

8. The method of any of claims 1 to 7, wherein the biological sample obtained from the subject is selected from the group comprising bladder tissue samples, histological slides, tissue embedded in paraffin, body fluids like blood plasma or serum, cell lines, urine specimen and combinations thereof.

9. A method according to claim 1, comprising:
a. extracting or otherwise isolating genomic DNA from a biological sample obtained from the subject;
b. digesting the genomic DNA of a), or a fragment thereof, with one or more methylation sensitive restriction enzymes;
contacting the DNA restriction enzyme digest of b), with an amplification enzyme and at least two primers suitable for the amplification of a sequence comprising at least one CpG dinucleotide of at least one genomic sequence, selected from a group comprising SEQ ID NO: 7, 1, 4, 10 and 13; preferably from SEQ ID NO: 2, 5, 8, 11, 14 and most preferably from SEQ ID NO: 9, 3, 6, 12, 15; and
c. determining, based on a presence or absence of an amplificate the methylation state or level of at least one CoG dinucleotide of at least one genomic sequence, selected from a group comprising SEQ ID NO: 7, 1, 4, 10 and 13; preferably from SEQ ID NO: 8, 2, 5, 11, 14 and most preferably from SEQ ID NO: 9, 3, 6, 12, 15, whereby detecting said disorder is at least in part, afforded.

10. A nucleic acid for use in the detection of bladder carcinoma, comprising at least 16 contiguous nucleotides of a sequence selected from the group consisting of SEQ ID NOS: 28, 29, 30, 31, 32, 33, 58, 59, 60, 61, 62, 63, 16, 17, 18, 19, 20, 21, 22, 23, 24, 25, 26, 27, 34, 35, 36, 37, 38, 39, 40, 41, 42, 43, 44, 45, 46, 47, 48, 49, 50, 51, 52, 53, 54, 55, 56, 57, 64, 65, 66, 67, 68, 69, 70, 71, 72, 73, 74, 75, and sequences complementary thereto.

11. A nucleic acid, comprising at least 50 contiguous nucleotides of a DNA sequence selected from the group consisting of SEQ ID NOS: 28, 29, 30, 31, 32, 33, 58, 59, 60, 61, 62, 63, 16, 17, 18, 19, 20, 21, 22, 23, 24, 25, 26, 27, 34, 35, 36, 37, 38, 39, 40, 41, 42, 43, 44, 45, 46, 47, 48, 49, 50, 51, 52, 53, 54, 55, 56, 57, 64, 65, 66, 67, 68, 69, 70, 71, 72, 73, 74, 75, and sequences complementary thereto.

12. The nucleic acid of any of claims 10 to 11 wherein the contiguous base sequence comprises at least one CpG, TpG or CpA dinucleotide sequence.

13. A kit suitable for performing the method according to claim 2 comprising a) a plurality of oligonucleotides or polynucleotides able to hybridise under stringent or moderately stringent conditions to the transcription products of at least one gene or genomic sequence selected from the group consisting of SEQ ID NO: 96, SEQ ID NO: 97, SEQ ID NO: 98, SEQ ID NO: 99 and SEQ ID NO: 100 and regulatory sequences thereof; (b) a container suitable for containing the oligonucleotides or polynucleotides and a biological sample of the patient comprising the transcription products wherein the oligonucleotides or polynucleotides can hybridise under stringent or moderately stringent conditions to the transcription products, (c) means to detect the hybridisation of (b); and optionally, (d) instructions for use and interpretation of the kit results.

14. A kit suitable for performing the method according to claim 3 comprising (a) a means for detecting at least one gene or genomic sequence selected from the group consisting of SEQ ID NO: 96, SEQ ID NO: 97, SEQ ID NO: 98, SEQ ID NO: 99 and SEQ ID NO: 100 and regulatory sequences thereof; (b) a container suitable for containing the said means and the biological sample of the patient comprising the polypeptides wherein the means can form complexes with the polypeptides; (c) a means to detect the complexes of (b).

15. A kit suitable for performing the method according to claim 1 comprising (a) a bisulfite reagent; (b) a container suitable for containing the said bisulfite reagent and the biological sample of the patient; (c) at least one set of oligonucleotides containing two oligonucleotides whose sequences in each case are identical, are complementary, or hybridize under stringent or highly stringent conditions to a 9 or more preferably 18 base long segment of a sequence selected from SEQ ID NOS: 28, 29, 30, 31, 32, 33, 58, 59, 60, 61, 62, 63, 16, 17, 18, 19, 20, 21, 22, 23, 24, 25, 26, 27, 34, 35, 36, 37, 38, 39, 40, 41, 42, 43, 44, 45, 46, 47, 48, 49, 50, 51, 52, 53, 54, 55, 56, 57, 64, 65, 66, 67, 68, 69, 70, 71, 72, 73, 74, 75.

16. A kit suitable for performing the method according to claim 1 comprising (a) a methylation sensitive restriction enzyme reagent; (b) a container suitable for containing the said reagent and the biological sample of the patient; (c) at least one set of oligonucleotides one or a plurality of nucleic acids or peptide nucleic acids which are identical, are complementary, or hybridize under stringent or highly stringent conditions to an at least 9 base long segment of of at least one genomic sequence, selected from a group comprising SEQ ID NO: 7, 1, 4, 10 and 13; preferably from SEQ ID NO: 8, 2, 5, 11, 14 and most preferably from SEQ ID NO: 9, 3, 6, 12, 15; and optionally (d) instructions for use and interpretation of the kit results.

17. The use of a method according to claims 1 to 9, a nucleic acid according to claims 10 to 12 and/or a kit according to claims 13 to 16 for at least one of: detection of; diagnosis of; prognosis of; treatment of; monitoring of; treatment and monitoring of; monitoring the treatment of; predicting the outcome of treatment of; differentiation between subclasses of and stage differentiation of bladder carcinoma.

The application's sequence listing, which the Patent Office published only in electronic form, follows.

SEQUENCE LISTING (120 sequences)

SEQ ID NO: 1 - DNA, 3300 bp, Homo Sapiens
gacaccgcgcgggagcttcccggggtccgacccgcgcctccccaccagcctcctccaccccagccagccccagatccaagggaacaggataaacgcccccagtccgatcccgccagcccgctcccacaattaagacaaaacgaaaaaacagcaatagaagcaaacacaaaaaagccccaaacggaaatctgccgggatcctgccctactctaaattccgggttagtgttgccttccccttccctctccaagcaccccttccctaagcccggccgccttcccacacccgctctccgctttcggcccccaacccggttcctgcaaaacccattgaagttccctttccttccttcttctcagtcctacaaaactcgttggtagggtctgtgggagccgcggggccctgccaacctcggggctgggccgggagccgagcgcaggcggtcggagggcaatggagcaagcgacagctccaggcgctcctgggccctcggctgggagggaagagccgaggaccctgggtcgcaccgcgcagatggagacgcgctcccagagcccccgggcaggtccagggaccccgcgacctgctctggcccagcggtgtgaccccgcgggtcctggcggtcctgactgcccgcaggggaggggcgcgccacttttggctgccctaggatgcgccgcctgaacctcttttccctcgcgggcagcgtccgccacattccccgggttcctcggaaactccaatcattctaccaggactattggggcctggggtagcccctcgggagccgcgtggacgagccctggccaggtgggagcgaagagcctcggcgactgccagtcctcccgcccccgcaccgccgggaaaggatggcgttttaatagacaggcagcaagttcaccgaggctgaagaatgaagccccttcagggccggcgggtcttgagatcaatgagcccaataagaaaaccaagcagggtcatgactcagaaattaaagaacacggggtcaggagaagaggtcagccacgacacaggcagcggcccgtctcctcccgatcctccaaaggcgcccttctcctagcctcctccgacctcagggatctgcaacttgggattcaaagcccccgagagggcagaacgaccatccaaaacgaactgcgccagcgagtgctgccgccctccccaacggccctggaagaccaccgccccgggccccaggcgcgtcctgtcccgtgcctacctccgacaccacctccaagagcgccaccgcggagcgggcgcctcctggacgctgcggggccactcgggctcggtaggccactcgggctcggtagacttcgggcgggccctgagggctgagccaggcttaagagggcgggcggggccgcggggcatcgacaggtcgagggtagggaattgacccggcccacgcagatccccgcgtcgtcttctccccgcccaccgcagccattggccgactctcgactcgccctctgtcccctggggtcgctcacttaactcatcagttttccaaaccctccctgggaccctagtggcgagcactcgccgctggccttctagggcaggcagtattgccgctccaggcgtgcggagtcggggagaaaaaaaccgaacacgtgtgctacccagggcccccagataagcccctccgcgcgcacacacaccctgaaccggagtccagaaggccggactcgcgtcccggggtcgagccccttactctccgctcccagttcggaagatcccagcctgcccgaaggcggcgtctgacccgctggtggacctggtgggtgtctgttcctgatacctggggacgaggcgggagcgccttgagcgctgggaagcttcgcctcgcgagtccccggcagtgacacgtgggagcgttgggcccggcacccccgacgcttccgaggtttcgggtggtcgttttgctctctcgggggcttttattccttaagtggctttaaacgaccgaggatgggcctcccgcgccgccgcagctgtcacttccttcgggaaaggctagcgaccttggacgcgcaggctctgaaaaccaaggtccagacccataccgagcgcccaaagaccgcatttgaattctcctcgccggccattgagggagagaaaggaacgcttagttccattcacattcacagaaagaagcgccgagggtgggggaaacgcagtcttgccgggtgagccgggacaggttcctcgcctgccccccggccgctgcttcctcttagctgaatggggagcgacccgccccgggcgcggccttcggggctgaagactgaggtgcagcctcacccccggcctggcagcggcttggaagagagagggaaaggaggaacatctacccggctaagagacgccgccagagtccctaaagctggcgggggacggaggccggggtcccggatcttcagagcgcccgcagccgggcttctgggctcctcggtgcggggaacctgaccctgtagccttcgccagggcgcggcggggctgcaagaagggaggaaggagtgggactagagccttcgagggcgcgggcggcgtgcactcagccttgtctccccgcgcgccctgccgcctgcttgccccctttgctgcaccgggtggccctggtccccgcgcccgcccgcccccgacgccttcgcgtggttccgcgctgcccgcggccagccccgtttcgcttcgcaaggagcgtgttgttttctcaatcgaaatgggatcaagatcccagggtttcctcgtctccttgttttgaggtgataggatcttagccaatagatcgaaaacgtgaaaagtacccgtcgcctcttgtcccaagtgcctctgtggaaggatcatttacttggaaaagcagaataaattctgttgccgttttccttccggaggcgtgctcaccccagagctcctagacccactggcattcgctatacttcctcctgggctttacaggtaggatttcaagaatgatatgggggcacctgggtgatctgtgggttgcaggtcctcaagaggccgttttttcgtgcacggaagtgtcgtagctttattttagcggaagcaatatcaaaccttatcttagaggtttgttttgcaaagaatccagagtttactatatttgacactattttaaaataacacttgcttgttttaagaagttgggagaaatcgataaaagaaaagttgaaatccatgcttcccatttctactctaggagataatcctgatcaacagtttggtttgctccctacccccattccttaaaaacaa

SEQ ID NO: 2 - DNA, 2700 bp, Homo Sapiens
ggcccccaacccggttcctgcaaaacccattgaagttccctttccttccttcttctcagtcctacaaaactcgttggtagggtctgtgggagccgcggggccctgccaacctcggggctgggccgggagccgagcgcaggcggtcggagggcaatggagcaagcgacagctccaggcgctcctgggccctcggctgggagggaagagccgaggaccctgggtcgcaccgcgcagatggagacgcgctcccagagcccccgggcaggtccagggaccccgcgacctgctctggcccagcggtgtgaccccgcgggtcctggcggtcctgactgcccgcaggggaggggcgcgccacttttggctgccctaggatgcgccgcctgaacctcttttccctcgcgggcagcgtccgccacattccccgggttcctcggaaactccaatcattctaccaggactattggggcctggggtagcccctcgggagccgcgtggacgagccctggccaggtgggagcgaagagcctcggcgactgccagtcctcccgcccccgcaccgccgggaaaggatggcgttttaatagacaggcagcaagttcaccgaggctgaagaatgaagccccttcagggccggcgggtcttgagatcaatgagcccaataagaaaaccaagcagggtcatgactcagaaattaaagaacacggggtcaggagaagaggtcagccacgacacaggcagcggcccgtctcctcccgatcctccaaaggcgcccttctcctagcctcctccgacctcagggatctgcaacttgggattcaaagcccccgagagggcagaacgaccatccaaaacgaactgcgccagcgagtgctgccgccctccccaacggccctggaagaccaccgccccgggccccaggcgcgtcctgtcccgtgcctacctccgacaccacctccaagagcgccaccgcggagcgggcgcctcctggacgctgcggggccactcgggctcggtaggccactcgggctcggtagacttcgggcgggccctgagggctgagccaggcttaagagggcgggcggggccgcggggcatcgacaggtcgagggtagggaattgacccggcccacgcagatccccgcgtcgtcttctccccgcccaccgcagccattggccgactctcgactcgccctctgtcccctggggtcgctcacttaactcatcagttttccaaaccctccctgggaccctagtggcgagcactcgccgctggccttctagggcaggcagtattgccgctccaggcgtgcggagtcggggagaaaaaaaccgaacacgtgtgctacccagggcccccagataagcccctccgcgcgcacacacaccctgaaccggagtccagaaggccggactcgcgtcccggggtcgagccccttactctccgctcccagttcggaagatcccagcctgcccgaaggcggcgtctgacccgctggtggacctggtgggtgtctgttcctgatacctggggacgaggcgggagcgccttgagcgctgggaagcttcgcctcgcgagtccccggcagtgacacgtgggagcgttgggcccggcacccccgacgcttccgaggtttcgggtggtcgttttgctctctcgggggcttttattccttaagtggctttaaacgaccgaggatgggcctcccgcgccgccgcagctgtcacttccttcgggaaaggctagcgaccttggacgcgcaggctctgaaaaccaaggtccagacccataccgagcgcccaaagaccgcatttgaattctcctcgccggccattgagggagagaaaggaacgcttagttccattcacattcacagaaagaagcgccgagggtgggggaaacgcagtcttgccgggtgagccgggacaggttcctcgcctgccccccggccgctgcttcctcttagctgaatggggagcgacccgccccgggcgcggccttcggggctgaagactgaggtgcagcctcacccccggcctggcagcggcttggaagagagagggaaaggaggaacatctacccggctaagagacgccgccagagtccctaaagctggcgggggacggaggccggggtcccggatcttcagagcgcccgcagccgggcttctgggctcctcggtgcggggaacctgaccctgtagccttcgccagggcgcggcggggctgcaagaagggaggaaggagtgggactagagccttcgagggcgcgggcggcgtgcactcagccttgtctccccgcgcgccctgccgcctgcttgccccctttgctgcaccgggtggccctggtccccgcgcccgcccgcccccgacgccttcgcgtggttccgcgctgcccgcggccagccccgtttcgcttcgcaaggagcgtgttgttttctcaatcgaaatgggatcaagatcccagggtttcctcgtctccttgttttgaggtgataggatcttagccaatagatcgaaaacgtgaaaagtacccgtcgcctcttgtcccaagtgcctctgtggaaggatcatttacttggaaaagcagaataaattctgttgccgttttccttccggaggcgtgctcaccccagagctcctagacccactggcattcgctatacttcctcctgggctttacaggtaggatttcaagaatga

SEQ ID NO: 3 - DNA, 280 bp, Homo Sapiens
tagagccttcgagggcgcgggcggcgtgcactcagccttgtctccccgcgcgccctgccgcctgcttgccccctttgctgcaccgggtggccctggtccccgcgcccgcccgcccccgacgccttcgcgtggttccgcgctgcccgcggccagccccgtttcgcttcgcaaggagcgtgttgttttctcaatcgaaatgggatcaagatcccagggtttcctcgtctccttgttttgaggtgataggatcttagccaatagatcgaaaacgtgaaaagta

SEQ ID NO: 4 - DNA, 1968 bp, Homo Sapiens
attttccaaaacttcacaagtgctccaggaatgatttggtgtcttttatgttttcagagcccaggcttcctgtgttctatgcagtgtatagatttgtctttgggttatttcctataccaaactttagtctttctcactgggtacaaagggaaattctaaaattctgttccccatggaaaaatgtcctttgctcctcggggcagattctgcagggagagacttgcaaatatgaaggaggagtggaaggtgtgatcggagaaaataccaaggactgaagtgtgaaggggtatgggatggattggaggcagttctgagatgagagcctgctgaattcgtgttccgggagatcaagttggcttcttctggaaaaaacctgtaagcttgggaaagctgggattggcttccatcacaagcagctgggatctaagttcatttgcatcagggccactccagctcagttctgctgggaaccgtaccgggatgggtgtgggacggcctcgaattcagatccgggtgctgttttttctaggcagtctctcggagcctgcttcctggactacaaaatgaagagttgtgaagagtcaataatgtcaagttggaagggtctgacacggaatctgaccaaggctggaccctcaataattgtgatttcttttcccccttttccttcttggtaaaatcatcccacgaatctacgcaagtagggcccttcgtcattcttcggagtagccgcttgagggctggaaggagcagtgatagaaaccccagagacgcagagaccctccgaacttcgaactcgatcactgtcctcccccgaccgccgaacccgctggagaagcgggcgcgacagggcgatgagttaacgcggagggagcgcggaggccgcggaagccgggggcgctgggtctcaggcccggatgctgagcgcggaccggcgtgtcctccccacagcgcccccgcgcggcctcctcccgctgcgccccgcacggcgacccgccgcgggtagccctggcgtttggccacgccgtcggctgaggaccgctagagctggggggagatcaaagcattcctatggggcccaaagagcctgggattgcagtgttgttagcctggcctcgccgcgtcaataaattttcggcgaaagttgggagcaggagtggaggcttggggcgggggttggtggggcgcgggggttggccggagggagggtccgggggtttcttgcacctgcgctcctgccgcgttaagtcagtgggaagcaagtgacatttccctttcacccgcccccttggaacttgctcatctccctcctttagaacaccgcctgctctccggggtcagcattatcaaagagaagatttcctccaggcccttaaaatttacgtggcgccttgttacaaggagcgcgctggaagctggctttggtatctccttgtcccctctttctcctgccccgcccccacatccccgtggagaaacccccgagcaggccttttgcattttctcaccccacttagaactacaaaaaatatatgggaaggtgatttggtttcacttcaacctcttcattttgcagaagcctaaagtggtgatggtgagaaaagtggcccaaggtcaagggttacttcagttggcaaaaccaggagtagaacaggagaatccctagagtcttactatatattttttgctacttatttcatggacaaaaataatcattctcttaggcaggtcaagtactctttaaaggtgtctgtgcttttgccagttggctgcaaaacttagcatcacacttgtcacctggacatcatggggagtcgctggctatccaacgacagagccgagtacactctgatccctcctctgagacactcctttctcactcccactccatcctgaaaaacactatggagcatgtgttctgggcaagtcttctcccaggcgtgggtaaaatttgagcacagggattct

SEQ ID NO: 5 - DNA, 1368 bp, Homo Sapiens
ggaggcagttctgagatgagagcctgctgaattcgtgttccgggagatcaagttggcttcttctggaaaaaacctgtaagcttgggaaagctgggattggcttccatcacaagcagctgggatctaagttcatttgcatcagggccactccagctcagttctgctgggaaccgtaccgggatgggtgtgggacggcctcgaattcagatccgggtgctgttttttctaggcagtctctcggagcctgcttcctggactacaaaatgaagagttgtgaagagtcaataatgtcaagttggaagggtctgacacggaatctgaccaaggctggaccctcaataattgtgatttcttttcccccttttccttcttggtaaaatcatcccacgaatctacgcaagtagggcccttcgtcattcttcggagtagccgcttgagggctggaaggagcagtgatagaaaccccagagacgcagagaccctccgaacttcgaactcgatcactgtcctcccccgaccgccgaacccgctggagaagcgggcgcgacagggcgatgagttaacgcggagggagcgcggaggccgcggaagccgggggcgctgggtctcaggcccggatgctgagcgcggaccggcgtgtcctccccacagcgcccccgcgcggcctcctcccgctgcgccccgcacggcgacccgccgcgggtagccctggcgtttggccacgccgtcggctgaggaccgctagagctggggggagatcaaagcattcctatggggcccaaagagcctgggattgcagtgttgttagcctggcctcgccgcgtcaataaattttcggcgaaagttgggagcaggagtggaggcttggggcgggggttggtggggcgcgggggttggccggagggagggtccgggggtttcttgcacctgcgctcctgccgcgttaagtcagtgggaagcaagtgacatttccctttcacccgcccccttggaacttgctcatctccctcctttagaacaccgcctgctctccggggtcagcattatcaaagagaagatttcctccaggcccttaaaatttacgtggcgccttgttacaaggagcgcgctggaagctggctttggtatctccttgtcccctctttctcctgccccgcccccacatccccgtggagaaacccccgagcaggccttttgcattttctcaccccacttagaactacaaaaaatatatgggaaggtgatttggtttcacttcaacctcttcattttgcagaagcctaaagtggtgatggtgagaaaagtggcccaaggtcaagggttacttcagttggcaaaaccaggagtagaacaggagaatccctagag

SEQ ID NO: 6 - DNA, 336 bp, Homo Sapiens
taggcagtctctcggagcctgcttcctggactacaaaatgaagagttgtgaagagtcaataatgtcaagttggaagggtctgacacggaatctgaccaaggctggaccctcaataattgtgatttcttttcccccttttccttcttggtaaaatcatcccacgaatctacgcaagtagggcccttcgtcattcttcggagtagccgcttgagggctggaaggagcagtgatagaaaccccagagacgcagagaccctccgaacttcgaactcgatcactgtcctcccccgaccgccgaacccgctggagaagcgggcgcgacagggcgatgagtta

SEQ ID NO: 7 - DNA, 1900 bp, Homo Sapiens
aaaaacctacttgctgaactgagtggttctggtctcagatggttaggtagcttaaaaacatgaagttgaagatggtagtcatttaaaaactgttttactgtcatttccatgacgataagaaagtaagtagaggcaagggtgttaaacccagaaacagtacacaggaatgaacaattcttggggatcttcattggcagacttcaaaaggcaaattttttagcttgatgtgaaccaccttctgtgactcttttcccctaatttattttgatatctctatatctttatggggaaaagctgccccaccatacagccaatcggtggactaggtaatctatgggagtgttgaaagtcgaaatcccaggttgggtctgtggtaaaatttctaacttcacctccagtcaacagaatgccacaatgagggaaaatattcagtaagttgaaaatacagaacaaggaagcggaaagaaattttagtgacaatgccactaagtggaaagaaggaaagtggctcactccctaggaaaacaaacactgatctttccacagctacatctcaagcgcattggccaaggcatgctttgccctgaaaaatcaccagaggccatagcgtggcccctttcggccacgtacagcgagttcgctattacagtgctttcagagggtacacgatcttactccctcacccaatttcttatccgtgtcctctctctgggcccctgtggcatctatacagcagcctctgtcctgctgccccctggatcctcagttctcattacatttggcggcctccaggaagcttgaacaaacctcgacgcgatcaaaggagaggaaagcctgcttgtcactttgggtggatcagagacaatatttccaggggacagggcgttacatggcagttcaaggcgcagtgacacccgagtctgatacaaccaacactagcttcgtcaggtggcccttcgatgctcatttccctaccaaacaagattcatatccgcttaataagaccctgggataattccaactctcgctccccagcaaggcgcgcggctggccagccggggcgggaagctggctctgcgttaaggactcgcagccttagcagcagtagaccaggcagaagtgtctcctcacttttaccccaagccctcccagaaactgccgtcagagcagacacaaggttttggttggggcattattttttgggtgggtggggaggggagaagagacaattaaaagttagttgaactgagaaaggaacctggtgaacttccctatcctgcccaacagccaaagacccccccacccccaacttagttctcccgactcccaaaccagtcaccacggaagcccaccgctgcccctcaacctaacgcggaaaatcctaccgctggggatctcaaataggtgcccagcaagctgtgtgccggattggggcggccggttccggcaatacctggtaacctctgggtgtctttaggcgtgtggctgccggcccatcttccgagggcgctcggaggcgaagcatccaagcgggtcctcgtatccagcgggcgggactctggcgggctccgcgcgaagatccgggctctggcccgagcgaatggcgctcaaaccccggcctggggagaatgacggcctgaattgcggcggggcgtcccctccaccgcagaaagtgtgggtacgcagaaacccgcggcaggagagccccaagtggagcgcagtctgacagcgtctgtctctgaactcgtgtcggaccgaggggacgccacccagcgggcagggtgacgtcaccgtctccctgacactccacattaaagggctggcatgttacagggagggagggggagagcgaaagccagcgcgagcaacagagagatcctttctcagcaggcacgaaagc

SEQ ID NO: 8 - DNA, 1002 bp, Homo Sapiens
ccaccatacagccaatcggtggactaggtaatctatgggagtgttgaaagtcgaaatcccaggttgggtctgtggtaaaatttctaacttcacctccagtcaacagaatgccacaatgagggaaaatattcagtaagttgaaaatacagaacaaggaagcggaaagaaattttagtgacaatgccactaagtggaaagaaggaaagtggctcactccctaggaaaacaaacactgatctttccacagctacatctcaagcgcattggccaaggcatgctttgccctgaaaaatcaccagaggccatagcgtggcccctttcggccacgtacagcgagttcgctattacagtgctttcagagggtacacgatcttactccctcacccaatttcttatccgtgtcctctctctgggcccctgtggcatctatacagcagcctctgtcctgctgccccctggatcctcagttctcattacatttggcggcctccaggaagcttgaacaaacctcgacgcgatcaaaggagaggaaagcctgcttgtcactttgggtggatcagagacaatatttccaggggacagggcgttacatggcagttcaaggcgcagtgacacccgagtctgatacaaccaacactagcttcgtcaggtggcccttcgatgctcatttccctaccaaacaagattcatatccgcttaataagaccctgggataattccaactctcgctccccagcaaggcgcgcggctggccagccggggcgggaagctggctctgcgttaaggactcgcagccttagcagcagtagaccaggcagaagtgtctcctcacttttaccccaagccctcccagaaactgccgtcagagcagacacaaggttttggttggggcattattttttgggtgggtggggaggggagaagagacaattaaaagttagttgaactgagaaaggaacctggtgaacttccctatcctgcccaacagccaaagaccccccc

SEQ ID NO: 9 - DNA, 276 bp, Homo Sapiens
tacacgatcttactccctcacccaatttcttatccgtgtcctctctctgggcccctgtggcatctatacagcagcctctgtcctgctgccccctggatcctcagttctcattacatttggcggcctccaggaagcttgaacaaacctcgacgcgatcaaaggagaggaaagcctgcttgtcactttgggtggatcagagacaatatttccaggggacagggcgttacatggcagttcaaggcgcagtgacacccgagtctgatacaaccaacacta

SEQ ID NO: 10 - DNA, 3100 bp, Homo Sapiens
cgcctttttcagaggagaaaagacctggcccacgcctcccagaggctttacctggtgaagaggaggagcagccactgcagcgcggtggacagggtgtcctggctggcgccgaagatgtcagtgatagtggccggtacgttctccaaatccagccgcgcgccaccaccgtgcgagtccccggccgccttcttttccgcagagaggataaaggcgtccatcatgtcgcggggggcggccccgggccgaaggctttcgcagtgcctcaagaacttgtccaggatgaagttgctgaagttgcggttgagctgctcgaattcgcggaaaacggtgcgcaccgggttggggaagtactgcagccagggcatcacgtccaccaggctgcccgcgcccaccgtgcgcccgaactcttcgttgtggctgagcagctcacggaactcggggtcgtcgtggctgtagcggcagccgaaacacacggcactcatgacgttggccacggccacgacggtcagcggcctcgggtcgaggaaggcgccgtccgcgctgccgcgcaccagcagcgccaccagctcgcgcgcctcgctcagcacgtggccctcgaggacttggcggctgcgcggctggcgcgtgaagaagttgcgcatcatgctgtgggctgcgcgccgctgcaccttccagtgctccgagtagtggccgaaagccatgctgcggccgccggacaccacacggaaggaggcgaaggccggccggtcggcgaaggccgagccctgctgcaccagggcctggtggatggcgcgctcgccattcagcaccactatggggcagctgcccaggcggatctggaaaacgtcgccgtagcgccgcgccaggcgagcgaacgagaggtgagccgcctggcccaccgccgccgcgtttccgatcagtggccacgcaaacgggcccgggggcgcggaccggagctgccgcctccgttgcctcagcagccgctggcccacatgcacagtggccagcaccgacaggagtagcaggagcgtggtctgctggatggacagcgggtttagcggccaagggtcgttcgggctgaggctggtgcccatgctggggacagagaggagaaggcgtgacactcaggggtgcagagacaggagcgggcgccccacgcccctaccccagcctctggggactgagtgccgttgggtggagaggtcggagctgactctctggagaaatggccgaagacgccccttcccatccccaacccactctcccttggagaagagaaggggcgtgtttccacctcgctgtaacccagcgccaaacccttcccctccccgcaaggcgcgtaacggttcctgcaatctggggacaacgctgcgggcatcgaggcggtggcgcttgatttcctttaaagtacctaccacgccacccgctacctgtaataatccatctgaagaggtcgccgggcagcgcctcggcagacagactgacctgcggggaggtgcggtttccagtggcgcgggacagccggctccgagaaggaactgggacctttgcctagggcaagacgtcaacaggaacccgcagcccggcctggacacctgctgccctcactggaagctttaactcccactcgagtctcttggcgtcgtcagtgccaggagcgcttggattgggatggggacggagaagggtgcctcgctcgccgagccccgctgcccttggggacctggcaaagtcgaggtttcctcacagcgttgagattgagactgggggtcggtgagtggcgtcaattcccatgcccttgcggctctcacaactggagtcgcagaagcgctcgctcccactcccactccagagtcaaagcgcgccatcccgctcctccgggttttaaggactgggtagaaggagggcagcgcgacctggcagggcggggcctgcggggggcggggcgcgccgcacaccaggccgctttgacccggactcccgtccaggcgcaccggccggcctcggagctctaccagcaggctttcatgggagcggaggtgcccacgtttccattgtgcggtaaccgcgcttcatcacagccacctccaatcgaggccgcacggtgtccccagaaccacgctcggtacaacctgccccggccgctgcgctcgacttgggagcgcgccccgccccgagcgcacgacctcccttccctctccgcgacttgagcttgcttcccggaaagccagtgtagtggcagcggtttgcctcacagcgcccctggttggttgtttaaattttatcttaggttctcgcaaacaaattgccacctcagtggaggctctttggcatgctaaattttttccagttcttgcggcgagatcaggaatccctaaaagtagccgctcccccgccccggggccccgacagtgcttgggcacacaaaggctcctggggcgcagctggccctgagatttcccgcgtagaggccactccaggtggcgccgcccgctggtgggcgcggggccgcccaggctgcgatggaagccgttggcgcagggcggggagccaagctggggcgactgggggggcctgggggagctagcggggcgggacccgagcggggcggagagtggcaggaggaggcgaatctccgcgctccggcgaactttatcgggttgaagtttctgctgtcgcctcccctttgcgtgcggagctgggctttgcgtgcgccgcttctggaaagtcggctccagtcatatccctgggcgctgcctgcggccgctcctcccgcgcttctcacggcacctgacacgcggaggcggcggccgagggtggggtgccggccaccaccacccttggcgtggggtgccggccgccaccaccctcggctgcgcacgcacagtcgcgcctgccaggccagcgaggcggacgcttgggccaccacccgcaggccgagcccgggcgcgtatcgccacctcgctgcgcaccggcggctctgtggtcttcctgggcgcgcttgcggtcgcgaagggggccctccctttataagggaagccggaggcgcttgggcgggggtggcttcccccgcctggcgcgccctttcctacatgctgat

SEQ ID NO: 11 - DNA, 2500 bp, Homo Sapiens
ttgagctgctcgaattcgcggaaaacggtgcgcaccgggttggggaagtactgcagccagggcatcacgtccaccaggctgcccgcgcccaccgtgcgcccgaactcttcgttgtggctgagcagctcacggaactcggggtcgtcgtggctgtagcggcagccgaaacacacggcactcatgacgttggccacggccacgacggtcagcggcctcgggtcgaggaaggcgccgtccgcgctgccgcgcaccagcagcgccaccagctcgcgcgcctcgctcagcacgtggccctcgaggacttggcggctgcgcggctggcgcgtgaagaagttgcgcatcatgctgtgggctgcgcgccgctgcaccttccagtgctccgagtagtggccgaaagccatgctgcggccgccggacaccacacggaaggaggcgaaggccggccggtcggcgaaggccgagccctgctgcaccagggcctggtggatggcgcgctcgccattcagcaccactatggggcagctgcccaggcggatctggaaaacgtcgccgtagcgccgcgccaggcgagcgaacgagaggtgagccgcctggcccaccgccgccgcgtttccgatcagtggccacgcaaacgggcccgggggcgcggaccggagctgccgcctccgttgcctcagcagccgctggcccacatgcacagtggccagcaccgacaggagtagcaggagcgtggtctgctggatggacagcgggtttagcggccaagggtcgttcgggctgaggctggtgcccatgctggggacagagaggagaaggcgtgacactcaggggtgcagagacaggagcgggcgccccacgcccctaccccagcctctggggactgagtgccgttgggtggagaggtcggagctgactctctggagaaatggccgaagacgccccttcccatccccaacccactctcccttggagaagagaaggggcgtgtttccacctcgctgtaacccagcgccaaacccttcccctccccgcaaggcgcgtaacggttcctgcaatctggggacaacgctgcgggcatcgaggcggtggcgcttgatttcctttaaagtacctaccacgccacccgctacctgtaataatccatctgaagaggtcgccgggcagcgcctcggcagacagactgacctgcggggaggtgcggtttccagtggcgcgggacagccggctccgagaaggaactgggacctttgcctagggcaagacgtcaacaggaacccgcagcccggcctggacacctgctgccctcactggaagctttaactcccactcgagtctcttggcgtcgtcagtgccaggagcgcttggattgggatggggacggagaagggtgcctcgctcgccgagccccgctgcccttggggacctggcaaagtcgaggtttcctcacagcgttgagattgagactgggggtcggtgagtggcgtcaattcccatgcccttgcggctctcacaactggagtcgcagaagcgctcgctcccactcccactccagagtcaaagcgcgccatcccgctcctccgggttttaaggactgggtagaaggagggcagcgcgacctggcagggcggggcctgcggggggcggggcgcgccgcacaccaggccgctttgacccggactcccgtccaggcgcaccggccggcctcggagctctaccagcaggctttcatgggagcggaggtgcccacgtttccattgtgcggtaaccgcgcttcatcacagccacctccaatcgaggccgcacggtgtccccagaaccacgctcggtacaacctgccccggccgctgcgctcgacttgggagcgcgccccgccccgagcgcacgacctcccttccctctccgcgacttgagcttgcttcccggaaagccagtgtagtggcagcggtttgcctcacagcgcccctggttggttgtttaaattttatcttaggttctcgcaaacaaattgccacctcagtggaggctctttggcatgctaaattttttccagttcttgcggcgagatcaggaatccctaaaagtagccgctcccccgccccggggccccgacagtgcttgggcacacaaaggctcctggggcgcagctggccctgagatttcccgcgtagaggccactccaggtggcgccgcccgctggtgggcgcggggccgcccaggctgcgatggaagccgttggcgcagggcggggagccaagctggggcgactgggggggcctgggggagctagcggggcgggacccgagcggggcggagagtggcaggaggaggcgaatctccgcgctccggcgaactttatcgggttgaagtttctgctgtcgcctcccctttgcgtgcggagctgggctttgcgtgcgccgcttctggaaagtcggctccagtcatatccctgggcgctgcctgcggccgctcctcccgcgcttctcacggcacctgacacgcg

SEQ ID NO: 12 - DNA, 216 bp, Homo Sapiens
tacgttctccaaatccagccgcgcgccaccaccgtgcgagtccccggccgccttcttttccgcagagaggataaaggcgtccatcatgtcgcggggggcggccccgggccgaaggctttcgcagtgcctcaagaacttgtccaggatgaagttgctgaagttgcggttgagctgctcgaattcgcggaaaacggtgcgcaccgggttggggaagta

SEQ ID NO: 13 - DNA, 9100 bp, Homo Sapiens
attcacaacctcagaagtttttttaagaggaaaaaaaaggtgtcacgtgttcgctgcccaacagactcaaacatcctattactcctattaccgttatcatcatctttactgaatattcctactacaagacaggcagacatgtgacatgcggtgaaggttctactttacccaccaccaatctccacaagcactctcatctcagggtgcctcggggagggcagaggaggaatacttgggctcaaaagtcgtctttggaccactttcagatcagtctggtggaaacggtagtgtgagcgctatgctacttgagactgcgtttgaaaatctctttcacgttcccaaatcaaagccactttgaggtttaagaatgataaccacaggtgaatgccttactctttccacgagccaggcctttcctttgcatgacgcagaccggcggctgagacccgtcctgaggccccgcctttcattcggtttatgtggccccgcgcagttcacgcagttttctccgttcttaggcaaccagctcgtgggaaattcactccagaaaagcgtgcgccatatcattattttgcgattcaacaaactttttcaactgttgttcaggaactagattccagatagatcttgttgtgttcggccttcctagaaattccttttccagaggaagaagatccgggttgggaagagtgcgtgactatggccccgggctcattgaaagactcctccccacaaaagtttagggctgatactaaacgaagctatggagccatgcccacacaaatactccccctttacccgaattgtggggcctggactgtgaaggccttcgctgcaagagcgggcactggcgaacttcagtgcacgccgcggccgagaacggatgcagggcgggggatggctgagccgcctgatccttgcagagaacctgcaggggccctcggagggtatcccctgcgtccaagggagcgcccctccttttcagcactcgggggaactgagggcgacgtgccagccccgcactcaactttccccttccctgcaggcacagagttggccggcgggggcagaggaggagctgggtctccactgcgcccgtttaaacctggccaggggctgcgtttcctccccccaccccacgacgatcctttcttagtcttcgcttttcaacccaatcgttaatcattcggaacgcgcgggcggggagcggcgaggagggcgagctcggggttcgccgccgccgccgccgccgcgcgcgcgcgctcaggaagcggtgtggctgtcaccccctcccgggcctcctcccccctccttcctgctttgctccccctccttcctcccctcctccccgctccgccgcccgcgcccagtgtatctactccctccccacgtcactcgccagcgcgccatgcaaatcaccgccgccgccggctcccattggccgcggcgcgctcatttaatggcagcccgggcccggcgtatggctgctgggccccgcgcgccgccggccccgcgtgcgcctccgctccgagcgcacggccccgggcaggcagcgggcagcccatcccgggctcggcggccccggctctccggccctctccgcgagcccgcgctcctcccgctgtccccgggcccctccctggctgcaccgtaatcgccccctgcaggcccccctgcgcctccccccccccgccactggcgcctggcttcccccgggcacctgggaccagcacatgcccagcgcacgcggcgcgccgccctgctagaagttgcagcctccgagttggaggccgctgaggaccgagcgcaggaggaaggagacagcgcgcagcggcggccggcgaggagacagcacaccccgggccgggcccagcgcaccgctcccggccccaaaagcggagctgcaacttggccacgactgcacctgtttgcaccgctccgccgagggcgcctgggctgcggtggcggcgaagacggcgaccccgaccgtcggcctctttggcaagtggtttgtgcatcaggagaaactttccacctgcgagccgaaccggcgccgagtgcgtgtgtttctgcctttttttgttgtcgttgcctccacccctccccattcttctctccgctaggacccccccgcccccgtctcactccgtctgaattcctctccgtctccctcccaccccggccgtctatgctccaggccctctcctcgcggtgccggtgaacccgccagccgccccgatgtacagcatgatgatggagaccgacctgcactcgcccggcggcgcccaggcccccacgaacctctcgggccccgccggggcgggcggcggcgggggcggaggcgggggcggcggcggcggcgggggcgccaaggccaaccaggaccgggtcaaacggcccatgaacgccttcatggtgtggtcccgcgggcagcggcgcaagatggcccaggagaaccccaagatgcacaactcggagatcagcaagcgcctgggggccgagtggaaggtcatgtccgaggccgagaagcggccgttcatcgacgaggccaagcggctgcgcgcgctgcacatgaaggagcacccggattacaagtaccggccgcgccgcaagaccaagacgctgctcaagaaggacaagtactcgctggccggcgggctcctggcggccggcgcgggtggcggcggcgcggctgtggccatgggcgtgggcgtgggcgtgggcgcggcggccgtgggccagcgcctggagagcccaggcggcgcggcgggcggcggctacgcgcacgtcaacggctgggccaacggcgcctaccccggctcggtggcggcggcggcggcggccgcggccatgatgcaggaggcgcagctggcctacgggcagcacccgggcgcgggcggcgcgcacccgcacgcgcaccccgcgcacccgcacccgcaccacccgcacgcgcacccgcacaacccgcagcccatgcaccgctacgacatgggcgcgctgcagtacagccccatctccaactcgcagggctacatgagcgcgtcgccctcgggctacggcggcctcccctacggcgccgcggccgccgccgccgccgctgcgggcggcgcgcaccagaactcggccgtggcggcggcggcggcggcggcggccgcgtcgtcgggcgccctgggcgcgctgggctctctggtgaagtcggagcccagcggcagcccgcccgccccagcgcactcgcgggcgccgtgccccggggacctgcgcgagatgatcagcatgtacttgcccgccggcgaggggggcgacccggcggcggcagcagcggccgcggcgcagagccggctgcactcgctgccgcagcactaccagggcgcgggcgcgggcgtgaacggcacggtgcccctgacgcacatctagcgccttcgggacgccggggactctgcggcggcgacccacgagctcgcggcccgcgcccggctcccgccccgccccggcgcggcgtggcttttgtacagacgttcccacattcttgtcaaaaggaaaatactggagacgaacgccgggtgacgcgtgtcccccactcaccttccccggagaccctggcgaccgccgggcgctgacaccagacttgggttttagactgaacttcggtgttttcttgagactttttgtacagtatttatcacctacggaggaagcggaaagcgttttctttgctcgaggggacaaaaaagtcaaaacgaggcgagaggcgaagcccacttttgtataccggccggcgcgctcactttcctccgcgttgcttccggacggcgccgaccgccggagcccaagtgacgcggagctcgtcgcatttgttataaatgtagtaaggcaggtccaagcacttacaagttttttgtagttgttaccgctcttttgggttggtttgttaatttatacaaagagattaccaccaccaccccctccttcagacggcggagttatattctgggttttgtaaaactttatgtatctgagcatttccatttttttttttgggttttgtattatttcttgtaaatgcattgtgaaaaattttattttcggcgttgcaatgcggggaggagaagtcagattatgtacatagttttctaaaaagcctttcttctaaaaacgaaaaaagaccccccacccaaaatgtttcgagtcaacaaatttaagagacagagcccattttctccataaatttgtaacatgctatttttatgtgcatgttttatgagttcaaaatgcaatgaggaaatctgacagggaaattatctgtatgaactaaaagtaagggaaccccggggaatgggaggacaggatttttcaaggaacctttttcaatgaaagagaaggaagttaaaacctataggttattttgtagagctgagtgttaatacgggccgagaaataaaagtatcttctgctccggctgtttcactgcggacggctggggctgctgcgcgttaccttgctgcaagcggggcgccttccacctggctgggggtctgcgccacagtttggtccagaggagggaggaggaagggaagaccccagtggtgggaccctggaccaggccatggatgaaggacaaagaccagggcaggtcacgggtttcccaattccccagcaattaagatttcgagcagaatttatctaaatgtgtttcaaggaaacacaatcgctgaaccaaaacgtactgcagccgagccccctccgtccatcctctgcccctccccctggcttctttctcttgggaaaacgggcaaaataattgtgctggattctcacacacacagaaatatcgaccatcaccctcccccgcgtgaactgggatgcaagttgctaaccgatgtgaacgcaaaatgccttgttcattattcctgacgagatcttgaggttgtttgatgctttaaattttttaattatattattttctaggtgtttattggtacattgcagttttttttttgaaatttaaaaatttctgtaaaactttgtcttcaagtaatctgacagcattaaatattgcatttaaaaattatactgtagcaaatacatttaaaaattaatcacaacgttaagatgaaattatatttttggaaaaaaaaaacacttgaagcccagatggaaatacgtttatttcagcagccttaggtttcccctcgctttctcaacacccttccttgtcctggagtatggactgtccgtccaaaagtgagcctatgctataagtttaatgagaaccgaattcagcctgcattcgagaatagctttaagtataatgctgatctgacaattgacgtgtaatttgggaagtcattttgataattttgcttaaaccactcattcgttaaagtgattacaaaaaagttcaagaatgatgtccactgctttctaacaagataataaaccccccccctcttttctttttctttatttttatttcttttagctatttgatcctttctgaagcagttgtttctggaagagtctgtgcgcccatggatggctgagcaccactacgacttagtccgggataagggcctccccagtcctctccgggagatgatttgggaaattttataatgcttgttctgttaactcaccgggaccttgagggtccaatgggaccttgagggttttctctgaaatatacaaacttaaaggactctctctgaggttctttgactgacgtccactctcagtctggcccctgtgctcccctgtgtgtaccctggagtttctgtgtccaattgttggcatctaggtcttggctcaagattaggatgtgggccccactttagaggcacagactatgaaaagctgagttagtgcgcccgggacgccaggcaagcagcttttacagtttggcatcttattgcaggtgcttcgtgcacagtcagctgaaatagccaatgccaggtgctccaaccaccttatttccttgttttgttgattagaacaacacagaaaaaagcaaatataaatttttaatgactccatttaaaaatatcacagggtgggggcaaggaaattagctgagattcatctcaggattgagattctatccccccttccccgcccccagcagtgtcgctccaattcaaattagtggagaaaagattacagtaggccctgagccgactgtgaattcggtgcttggccaaggtaacactcatcgtattcacggagtgaaatactatatgatgatagttattatattatatgacgacttcattcacttcccaaatcacagggtggtgcttctgtcgcttagtccaattatgtttgcaacccgtgtagggaaggcggataggagtctttgaggcctagtgcaaagtttgcatcagtttctgcgggggcgacagtgtgacttcgtaaatctgccattgcgctcgggccctgccctccaaactgagggtaggagggtttacttgagggtttttttgctttgttttgttctgtttttgccttgttttgtttttcaactcacccgccccttttgttgttgagattttgacgtccccttccccggagaaacccacccgtaacgtactagatggattagttttaaagaagactcgggcacagcgtgatctccagatgcgcgtcgggagcgtgactgataggtctattaaaatcacgcgtgtgggagaacggcactcatgctcccgcgtttcattcccccggcaaagactgggcgccgcagatttctgtctccggaaaattccagttaattcaagaaacccatccccggacgtgtgcccgcccccccccgaaggctcgcttcaggccagcccggactccagcgccccctcgaccccgtcgggctccggccgactcccgccccctccccacccacgctcggcctgggcccgggggcagcggctccagaggcgtcggcggcagaatttaacccccggtctgagtccttggaaacttcaagtgaaaagcagacttggccttggcgcggctctctttccagcgtgactatctggcgagactgaaaggccaggccagatggggaaaagtgagcggggtgcgggcccccagtatccggcggggtggggcggcgtcaggacggagcgagggccggcgggggggctcgcgtggaggcccaggccgggaggtggggacgcagggacccctcacccagtcctctgctcccgcccgagccaggcctcgggatcacctccccttgcctgagggcgagctctcctcctccctcttcctccccgcctcccccgttcttccctccctctctccctcctccctccccggcccttcctctccagctgcgcgcccgccgggaccacgctcctcccgcccccgggagccgagcggcgtctgcggctggtccggacgtgtcccctccgggcgggggtggccgggcctcctcggggcctcgggcctcccgggcgcacccccctgcctgcgcctctccaagtcgccctttctccggctctgcccgcggctgagccccgcacaccgcgccgctgtccttggggtcccggcacacggcgttccctccccgcccccgccatccactcccaccgcctctccagtccctgtgccgtctccaccgccctctgactcccgcaccgagctgcgtctccgccgccggcctctctcagcgcggcccggcctcctctttgtctttgaagctcccccgccgaggcccgcgcgcggctcccctctccgtccctctccggcccttgggcgcccagtcggaggtcggggcgggatggggcacgagtctcggggcggcccgcgctccccctactagtcccctcattgcctcggccccgtccccgcagcctcggggcgggagggcgcaggggtccccgggcgccctgggagcccatctccctcaggtccgcgccggtgtcagccgccggcggggggcgggtggagattaagatgagtgctgcgagggacggggccgagggttttgtgtagaaggagagcaggattagtggagagaaagtgctgacccggggtcagccgcaagtcaaacccttttacactcagccggcggaacgagcacggctcgggccggacggcaacaagtgggcgcgaagggagggggaggggaggccgggtaccggccgggtccggcgtgagagaggggagggggaggggacgcggccacagcgccccagggcctcagcgtcatcggggacgggcgccgaggggagcgcgcaccagcgacccgggcgcggactggggcctgcagggcgtgactggctgccccccaggactccatctccttcataaacacctgccttttccattccccggggccgcttcggctgctcctctggagggaagactggggagaaggttgcctgcgctctctgccccagaggctctgttttagaaactgtttcttaatttccataagaaacaaaaaaatcacaggaaggcctggttcctctcccggacgactgcgtccccaggctctccaggaatcttcgccttatccgagcttcttcgcagccctggatctatttctggggggcgtgtgtgacgcagaatcggggtataaaatatcaatgctgtttgtcacgacaccgctttctccacccgggcagagctgcggctcccgggcgttgcgcgtggcgtttttcatcacggagggaaagccgcggctccgcgggaaaggagtgaaaaccgagtgtgggtgaagaggagagggaggtcagggggcaagggaagaaagcagataaatgcatcttccctagcagccaagctggaaatttgtgctgaaagtacaacagcaagagttttcacatgaaaaacacgtgaagaacccgagcaagtgatagatccaaagacggaaaatgatcgtctattttgatagtaaaaataaaaagaacagaattgacatattttcgtctaaattacttttcatctgccgatatgaaacaccaacactcaaacaaaaacaaaggacaaagcagtttttaaaaacaacacaaaacaagcaactctgagtgaatgacctgtccacagcttaccctgggtgacatgggggcgctgtgatggaaaatgggttctgggttcaaaatca

SEQ ID NO: 14 - DNA, 8500 bp, Homo Sapiens
gctacttgagactgcgtttgaaaatctctttcacgttcccaaatcaaagccactttgaggtttaagaatgataaccacaggtgaatgccttactctttccacgagccaggcctttcctttgcatgacgcagaccggcggctgagacccgtcctgaggccccgcctttcattcggtttatgtggccccgcgcagttcacgcagttttctccgttcttaggcaaccagctcgtgggaaattcactccagaaaagcgtgcgccatatcattattttgcgattcaacaaactttttcaactgttgttcaggaactagattccagatagatcttgttgtgttcggccttcctagaaattccttttccagaggaagaagatccgggttgggaagagtgcgtgactatggccccgggctcattgaaagactcctccccacaaaagtttagggctgatactaaacgaagctatggagccatgcccacacaaatactccccctttacccgaattgtggggcctggactgtgaaggccttcgctgcaagagcgggcactggcgaacttcagtgcacgccgcggccgagaacggatgcagggcgggggatggctgagccgcctgatccttgcagagaacctgcaggggccctcggagggtatcccctgcgtccaagggagcgcccctccttttcagcactcgggggaactgagggcgacgtgccagccccgcactcaactttccccttccctgcaggcacagagttggccggcgggggcagaggaggagctgggtctccactgcgcccgtttaaacctggccaggggctgcgtttcctccccccaccccacgacgatcctttcttagtcttcgcttttcaacccaatcgttaatcattcggaacgcgcgggcggggagcggcgaggagggcgagctcggggttcgccgccgccgccgccgccgcgcgcgcgcgctcaggaagcggtgtggctgtcaccccctcccgggcctcctcccccctccttcctgctttgctccccctccttcctcccctcctccccgctccgccgcccgcgcccagtgtatctactccctccccacgtcactcgccagcgcgccatgcaaatcaccgccgccgccggctcccattggccgcggcgcgctcatttaatggcagcccgggcccggcgtatggctgctgggccccgcgcgccgccggccccgcgtgcgcctccgctccgagcgcacggccccgggcaggcagcgggcagcccatcccgggctcggcggccccggctctccggccctctccgcgagcccgcgctcctcccgctgtccccgggcccctccctggctgcaccgtaatcgccccctgcaggcccccctgcgcctccccccccccgccactggcgcctggcttcccccgggcacctgggaccagcacatgcccagcgcacgcggcgcgccgccctgctagaagttgcagcctccgagttggaggccgctgaggaccgagcgcaggaggaaggagacagcgcgcagcggcggccggcgaggagacagcacaccccgggccgggcccagcgcaccgctcccggccccaaaagcggagctgcaacttggccacgactgcacctgtttgcaccgctccgccgagggcgcctgggctgcggtggcggcgaagacggcgaccccgaccgtcggcctctttggcaagtggtttgtgcatcaggagaaactttccacctgcgagccgaaccggcgccgagtgcgtgtgtttctgcctttttttgttgtcgttgcctccacccctccccattcttctctccgctaggacccccccgcccccgtctcactccgtctgaattcctctccgtctccctcccaccccggccgtctatgctccaggccctctcctcgcggtgccggtgaacccgccagccgccccgatgtacagcatgatgatggagaccgacctgcactcgcccggcggcgcccaggcccccacgaacctctcgggccccgccggggcgggcggcggcgggggcggaggcgggggcggcggcggcggcgggggcgccaaggccaaccaggaccgggtcaaacggcccatgaacgccttcatggtgtggtcccgcgggcagcggcgcaagatggcccaggagaaccccaagatgcacaactcggagatcagcaagcgcctgggggccgagtggaaggtcatgtccgaggccgagaagcggccgttcatcgacgaggccaagcggctgcgcgcgctgcacatgaaggagcacccggattacaagtaccggccgcgccgcaagaccaagacgctgctcaagaaggacaagtactcgctggccggcgggctcctggcggccggcgcgggtggcggcggcgcggctgtggccatgggcgtgggcgtgggcgtgggcgcggcggccgtgggccagcgcctggagagcccaggcggcgcggcgggcggcggctacgcgcacgtcaacggctgggccaacggcgcctaccccggctcggtggcggcggcggcggcggccgcggccatgatgcaggaggcgcagctggcctacgggcagcacccgggcgcgggcggcgcgcacccgcacgcgcaccccgcgcacccgcacccgcaccacccgcacgcgcacccgcacaacccgcagcccatgcaccgctacgacatgggcgcgctgcagtacagccccatctccaactcgcagggctacatgagcgcgtcgccctcgggctacggcggcctcccctacggcgccgcggccgccgccgccgccgctgcgggcggcgcgcaccagaactcggccgtggcggcggcggcggcggcggcggccgcgtcgtcgggcgccctgggcgcgctgggctctctggtgaagtcggagcccagcggcagcccgcccgccccagcgcactcgcgggcgccgtgccccggggacctgcgcgagatgatcagcatgtacttgcccgccggcgaggggggcgacccggcggcggcagcagcggccgcggcgcagagccggctgcactcgctgccgcagcactaccagggcgcgggcgcgggcgtgaacggcacggtgcccctgacgcacatctagcgccttcgggacgccggggactctgcggcggcgacccacgagctcgcggcccgcgcccggctcccgccccgccccggcgcggcgtggcttttgtacagacgttcccacattcttgtcaaaaggaaaatactggagacgaacgccgggtgacgcgtgtcccccactcaccttccccggagaccctggcgaccgccgggcgctgacaccagacttgggttttagactgaacttcggtgttttcttgagactttttgtacagtatttatcacctacggaggaagcggaaagcgttttctttgctcgaggggacaaaaaagtcaaaacgaggcgagaggcgaagcccacttttgtataccggccggcgcgctcactttcctccgcgttgcttccggacggcgccgaccgccggagcccaagtgacgcggagctcgtcgcatttgttataaatgtagtaaggcaggtccaagcacttacaagttttttgtagttgttaccgctcttttgggttggtttgttaatttatacaaagagattaccaccaccaccccctccttcagacggcggagttatattctgggttttgtaaaactttatgtatctgagcatttccatttttttttttgggttttgtattatttcttgtaaatgcattgtgaaaaattttattttcggcgttgcaatgcggggaggagaagtcagattatgtacatagttttctaaaaagcctttcttctaaaaacgaaaaaagaccccccacccaaaatgtttcgagtcaacaaatttaagagacagagcccattttctccataaatttgtaacatgctatttttatgtgcatgttttatgagttcaaaatgcaatgaggaaatctgacagggaaattatctgtatgaactaaaagtaagggaaccccggggaatgggaggacaggatttttcaaggaacctttttcaatgaaagagaaggaagttaaaacctataggttattttgtagagctgagtgttaatacgggccgagaaataaaagtatcttctgctccggctgtttcactgcggacggctggggctgctgcgcgttaccttgctgcaagcggggcgccttccacctggctgggggtctgcgccacagtttggtccagaggagggaggaggaagggaagaccccagtggtgggaccctggaccaggccatggatgaaggacaaagaccagggcaggtcacgggtttcccaattccccagcaattaagatttcgagcagaatttatctaaatgtgtttcaaggaaacacaatcgctgaaccaaaacgtactgcagccgagccccctccgtccatcctctgcccctccccctggcttctttctcttgggaaaacgggcaaaataattgtgctggattctcacacacacagaaatatcgaccatcaccctcccccgcgtgaactgggatgcaagttgctaaccgatgtgaacgcaaaatgccttgttcattattcctgacgagatcttgaggttgtttgatgctttaaattttttaattatattattttctaggtgtttattggtacattgcagttttttttttgaaatttaaaaatttctgtaaaactttgtcttcaagtaatctgacagcattaaatattgcatttaaaaattatactgtagcaaatacatttaaaaattaatcacaacgttaagatgaaattatatttttggaaaaaaaaaacacttgaagcccagatggaaatacgtttatttcagcagccttaggtttcccctcgctttctcaacacccttccttgtcctggagtatggactgtccgtccaaaagtgagcctatgctataagtttaatgagaaccgaattcagcctgcattcgagaatagctttaagtataatgctgatctgacaattgacgtgtaatttgggaagtcattttgataattttgcttaaaccactcattcgttaaagtgattacaaaaaagttcaagaatgatgtccactgctttctaacaagataataaaccccccccctcttttctttttctttatttttatttcttttagctatttgatcctttctgaagcagttgtttctggaagagtctgtgcgcccatggatggctgagcaccactacgacttagtccgggataagggcctccccagtcctctccgggagatgatttgggaaattttataatgcttgttctgttaactcaccgggaccttgagggtccaatgggaccttgagggttttctctgaaatatacaaacttaaaggactctctctgaggttctttgactgacgtccactctcagtctggcccctgtgctcccctgtgtgtaccctggagtttctgtgtccaattgttggcatctaggtcttggctcaagattaggatgtgggccccactttagaggcacagactatgaaaagctgagttagtgcgcccgggacgccaggcaagcagcttttacagtttggcatcttattgcaggtgcttcgtgcacagtcagctgaaatagccaatgccaggtgctccaaccaccttatttccttgttttgttgattagaacaacacagaaaaaagcaaatataaatttttaatgactccatttaaaaatatcacagggtgggggcaaggaaattagctgagattcatctcaggattgagattctatccccccttccccgcccccagcagtgtcgctccaattcaaattagtggagaaaagattacagtaggccctgagccgactgtgaattcggtgcttggccaaggtaacactcatcgtattcacggagtgaaatactatatgatgatagttattatattatatgacgacttcattcacttcccaaatcacagggtggtgcttctgtcgcttagtccaattatgtttgcaacccgtgtagggaaggcggataggagtctttgaggcctagtgcaaagtttgcatcagtttctgcgggggcgacagtgtgacttcgtaaatctgccattgcgctcgggccctgccctccaaactgagggtaggagggtttacttgagggtttttttgctttgttttgttctgtttttgccttgttttgtttttcaactcacccgccccttttgttgttgagattttgacgtccccttccccggagaaacccacccgtaacgtactagatggattagttttaaagaagactcgggcacagcgtgatctccagatgcgcgtcgggagcgtgactgataggtctattaaaatcacgcgtgtgggagaacggcactcatgctcccgcgtttcattcccccggcaaagactgggcgccgcagatttctgtctccggaaaattccagttaattcaagaaacccatccccggacgtgtgcccgcccccccccgaaggctcgcttcaggccagcccggactccagcgccccctcgaccccgtcgggctccggccgactcccgccccctccccacccacgctcggcctgggcccgggggcagcggctccagaggcgtcggcggcagaatttaacccccggtctgagtccttggaaacttcaagtgaaaagcagacttggccttggcgcggctctctttccagcgtgactatctggcgagactgaaaggccaggccagatggggaaaagtgagcggggtgcgggcccccagtatccggcggggtggggcggcgtcaggacggagcgagggccggcgggggggctcgcgtggaggcccaggccgggaggtggggacgcagggacccctcacccagtcctctgctcccgcccgagccaggcctcgggatcacctccccttgcctgagggcgagctctcctcctccctcttcctccccgcctcccccgttcttccctccctctctccctcctccctccccggcccttcctctccagctgcgcgcccgccgggaccacgctcctcccgcccccgggagccgagcggcgtctgcggctggtccggacgtgtcccctccgggcgggggtggccgggcctcctcggggcctcgggcctcccgggcgcacccccctgcctgcgcctctccaagtcgccctttctccggctctgcccgcggctgagccccgcacaccgcgccgctgtccttggggtcccggcacacggcgttccctccccgcccccgccatccactcccaccgcctctccagtccctgtgccgtctccaccgccctctgactcccgcaccgagctgcgtctccgccgccggcctctctcagcgcggcccggcctcctctttgtctttgaagctcccccgccgaggcccgcgcgcggctcccctctccgtccctctccggcccttgggcgcccagtcggaggtcggggcgggatggggcacgagtctcggggcggcccgcgctccccctactagtcccctcattgcctcggccccgtccccgcagcctcggggcgggagggcgcaggggtccccgggcgccctgggagcccatctccctcaggtccgcgccggtgtcagccgccggcggggggcgggtggagattaagatgagtgctgcgagggacggggccgagggttttgtgtagaaggagagcaggattagtggagagaaagtgctgacccggggtcagccgcaagtcaaacccttttacactcagccggcggaacgagcacggctcgggccggacggcaacaagtgggcgcgaagggagggggaggggaggccgggtaccggccgggtccggcgtgagagaggggagggggaggggacgcggccacagcgccccagggcctcagcgtcatcggggacgggcgccgaggggagcgcgcaccagcgacccgggcgcggactggggcctgcagggcgtgactggctgccccccaggactccatctccttcataaacacctgccttttccattccccggggccgcttcggctgctcctctggagggaagactggggagaaggttgcctgcgctctctgccccagaggctctgttttagaaactgtttcttaatttccataagaaacaaaaaaatcacaggaaggcctggttcctctcccggacgactgcgtccccaggctctccaggaatcttcgccttatccgagcttcttcgcagccctggatctatttctggggggcgtgtgtgacgcagaatcggggtataaaatatcaatgctgtttgtcacgacaccgctttctccacccgggcagagctgcggctcccgggcgttgcgcgtggcgtttttcatcacggagggaaagccgcggctccgcgggaaaggagtgaaaaccgagtgtgggtgaagaggagagggaggtcagggggcaagggaagaaagcagataaatgcatcttccctagcagccaagctggaaatttgtgctgaaagt

SEQ ID NO: 15 - DNA, 263 bp, Homo Sapiens
tacagtatttatcacctacggaggaagcggaaagcgttttctttgctcgaggggacaaaaaagtcaaaacgaggcgagaggcgaagcccacttttgtataccggccggcgcgctcactttcctccgcgttgcttccggacggcgccgaccgccggagcccaagtgacgcggagctcgtcgcatttgttataaatgtagtaaggcaggtccaagcacttacaagttttttgtagttgttaccgctcttttgggttggtttgtta

SEQ ID NO: 16 - DNA, 3300 bp, Artificial Sequence
  chemically treated genomic DNA (Homo sapiens)
gatatcgcgcgggagtttttcggggttcgattcgcgtttttttattagttttttttattttagttagttttagatttaagggaataggataaacgtttttagttcgatttcgttagttcgtttttataattaagataaaacgaaaaaatagtaatagaagtaaatataaaaaagttttaaacggaaatttgtcgggattttgttttattttaaatttcgggttagtgttgttttttttttttttttttaagtattttttttttaagttcggtcgtttttttatattcgtttttcgttttcggtttttaattcggtttttgtaaaatttattgaagttttttttttttttttttttttagttttataaaattcgttggtagggtttgtgggagtcgcggggttttgttaatttcggggttgggtcgggagtcgagcgtaggcggtcggagggtaatggagtaagcgatagttttaggcgtttttgggttttcggttgggagggaagagtcgaggattttgggtcgtatcgcgtagatggagacgcgtttttagagttttcgggtaggtttagggatttcgcgatttgttttggtttagcggtgtgatttcgcgggttttggcggttttgattgttcgtaggggaggggcgcgttatttttggttgttttaggatgcgtcgtttgaattttttttttttcgcgggtagcgttcgttatatttttcgggtttttcggaaattttaattattttattaggattattggggtttggggtagtttttcgggagtcgcgtggacgagttttggttaggtgggagcgaagagtttcggcgattgttagttttttcgttttcgtatcgtcgggaaaggatggcgttttaatagataggtagtaagtttatcgaggttgaagaatgaagtttttttagggtcggcgggttttgagattaatgagtttaataagaaaattaagtagggttatgatttagaaattaaagaatacggggttaggagaagaggttagttacgatataggtagcggttcgttttttttcgattttttaaaggcgttttttttttagtttttttcgattttagggatttgtaatttgggatttaaagttttcgagagggtagaacgattatttaaaacgaattgcgttagcgagtgttgtcgttttttttaacggttttggaagattatcgtttcgggttttaggcgcgttttgtttcgtgtttattttcgatattatttttaagagcgttatcgcggagcgggcgttttttggacgttgcggggttattcgggttcggtaggttattcgggttcggtagatttcgggcgggttttgagggttgagttaggtttaagagggcgggcggggtcgcggggtatcgataggtcgagggtagggaattgattcggtttacgtagattttcgcgtcgtttttttttcgtttatcgtagttattggtcgattttcgattcgttttttgttttttggggtcgtttatttaatttattagttttttaaattttttttgggattttagtggcgagtattcgtcgttggttttttagggtaggtagtattgtcgttttaggcgtgcggagtcggggagaaaaaaatcgaatacgtgtgttatttagggtttttagataagttttttcgcgcgtatatatattttgaatcggagtttagaaggtcggattcgcgtttcggggtcgagttttttatttttcgtttttagttcggaagattttagtttgttcgaaggcggcgtttgattcgttggtggatttggtgggtgtttgtttttgatatttggggacgaggcgggagcgttttgagcgttgggaagtttcgtttcgcgagttttcggtagtgatacgtgggagcgttgggttcggtattttcgacgttttcgaggtttcgggtggtcgttttgttttttcgggggtttttattttttaagtggttttaaacgatcgaggatgggtttttcgcgtcgtcgtagttgttatttttttcgggaaaggttagcgattttggacgcgtaggttttgaaaattaaggtttagatttatatcgagcgtttaaagatcgtatttgaatttttttcgtcggttattgagggagagaaaggaacgtttagttttatttatatttatagaaagaagcgtcgagggtgggggaaacgtagttttgtcgggtgagtcgggataggtttttcgtttgtttttcggtcgttgtttttttttagttgaatggggagcgattcgtttcgggcgcggttttcggggttgaagattgaggtgtagttttattttcggtttggtagcggtttggaagagagagggaaaggaggaatatttattcggttaagagacgtcgttagagtttttaaagttggcgggggacggaggtcggggtttcggatttttagagcgttcgtagtcgggtttttgggtttttcggtgcggggaatttgattttgtagttttcgttagggcgcggcggggttgtaagaagggaggaaggagtgggattagagttttcgagggcgcgggcggcgtgtatttagttttgttttttcgcgcgttttgtcgtttgtttgttttttttgttgtatcgggtggttttggttttcgcgttcgttcgttttcgacgttttcgcgtggtttcgcgttgttcgcggttagtttcgtttcgtttcgtaaggagcgtgttgtttttttaatcgaaatgggattaagattttagggttttttcgtttttttgttttgaggtgataggattttagttaatagatcgaaaacgtgaaaagtattcgtcgttttttgttttaagtgtttttgtggaaggattatttatttggaaaagtagaataaattttgttgtcgtttttttttcggaggcgtgtttattttagagtttttagatttattggtattcgttatatttttttttgggttttataggtaggattttaagaatgatatgggggtatttgggtgatttgtgggttgtaggtttttaagaggtcgttttttcgtgtacggaagtgtcgtagttttattttagcggaagtaatattaaattttattttagaggtttgttttgtaaagaatttagagtttattatatttgatattattttaaaataatatttgtttgttttaagaagttgggagaaatcgataaaagaaaagttgaaatttatgttttttatttttattttaggagataattttgattaatagtttggtttgttttttatttttattttttaaaaataa

SEQ ID NO: 17 - DNA, 3300 bp, Artificial Sequence
  chemically treated genomic DNA (Homo sapiens)
ttgtttttaaggaatgggggtagggagtaaattaaattgttgattaggattattttttagagtagaaatgggaagtatggattttaattttttttttatcgattttttttaattttttaaaataagtaagtgttattttaaaatagtgttaaatatagtaaattttggattttttgtaaaataaatttttaagataaggtttgatattgttttcgttaaaataaagttacgatattttcgtgtacgaaaaaacggttttttgaggatttgtaatttatagattatttaggtgtttttatattatttttgaaattttatttgtaaagtttaggaggaagtatagcgaatgttagtgggtttaggagttttggggtgagtacgttttcggaaggaaaacggtaatagaatttattttgtttttttaagtaaatgatttttttatagaggtatttgggataagaggcgacgggtattttttacgttttcgatttattggttaagattttattattttaaaataaggagacgaggaaattttgggattttgattttatttcgattgagaaaataatacgttttttgcgaagcgaaacggggttggtcgcgggtagcgcggaattacgcgaaggcgtcgggggcgggcgggcgcggggattagggttattcggtgtagtaaagggggtaagtaggcggtagggcgcgcggggagataaggttgagtgtacgtcgttcgcgttttcgaaggttttagttttatttttttttttttttttgtagtttcgtcgcgttttggcgaaggttatagggttaggtttttcgtatcgaggagtttagaagttcggttgcgggcgttttgaagattcgggatttcggttttcgtttttcgttagttttagggattttggcggcgttttttagtcgggtagatgtttttttttttttttttttttttaagtcgttgttaggtcgggggtgaggttgtattttagtttttagtttcgaaggtcgcgttcggggcgggtcgttttttatttagttaagaggaagtagcggtcggggggtaggcgaggaatttgtttcggtttattcggtaagattgcgttttttttattttcggcgtttttttttgtgaatgtgaatggaattaagcgttttttttttttttttaatggtcggcgaggagaatttaaatgcggtttttgggcgttcggtatgggtttggattttggtttttagagtttgcgcgtttaaggtcgttagtttttttcgaaggaagtgatagttgcggcggcgcgggaggtttattttcggtcgtttaaagttatttaaggaataaaagttttcgagagagtaaaacgattattcgaaatttcggaagcgtcgggggtgtcgggtttaacgtttttacgtgttattgtcggggattcgcgaggcgaagttttttagcgtttaaggcgttttcgtttcgtttttaggtattaggaatagatatttattaggtttattagcgggttagacgtcgttttcgggtaggttgggatttttcgaattgggagcggagagtaaggggttcgatttcgggacgcgagttcggttttttggatttcggtttagggtgtgtgtgcgcgcggaggggtttatttgggggttttgggtagtatacgtgttcggttttttttttttcgatttcgtacgtttggagcggtaatattgtttgttttagaaggttagcggcgagtgttcgttattagggttttagggagggtttggaaaattgatgagttaagtgagcgattttaggggatagagggcgagtcgagagtcggttaatggttgcggtgggcggggagaagacgacgcggggatttgcgtgggtcgggttaattttttattttcgatttgtcgatgtttcgcggtttcgttcgtttttttaagtttggtttagtttttagggttcgttcgaagtttatcgagttcgagtggtttatcgagttcgagtggtttcgtagcgtttaggaggcgttcgtttcgcggtggcgtttttggaggtggtgtcggaggtaggtacgggataggacgcgtttggggttcggggcggtggttttttagggtcgttggggagggcggtagtattcgttggcgtagttcgttttggatggtcgttttgttttttcgggggttttgaattttaagttgtagatttttgaggtcggaggaggttaggagaagggcgtttttggaggatcgggaggagacgggtcgttgtttgtgtcgtggttgatttttttttttgatttcgtgttttttaatttttgagttatgattttgtttggtttttttattgggtttattgattttaagattcgtcggttttgaaggggttttattttttagtttcggtgaatttgttgtttgtttattaaaacgttattttttttcggcggtgcgggggcgggaggattggtagtcgtcgaggtttttcgtttttatttggttagggttcgtttacgcggttttcgaggggttattttaggttttaatagttttggtagaatgattggagttttcgaggaattcggggaatgtggcggacgttgttcgcgagggaaaagaggtttaggcggcgtattttagggtagttaaaagtggcgcgttttttttttgcgggtagttaggatcgttaggattcgcggggttatatcgttgggttagagtaggtcgcggggtttttggatttgttcgggggttttgggagcgcgtttttatttgcgcggtgcgatttagggttttcggttttttttttttagtcgagggtttaggagcgtttggagttgtcgtttgttttattgtttttcgatcgtttgcgttcggttttcggtttagtttcgaggttggtagggtttcgcggtttttatagattttattaacgagttttgtaggattgagaagaaggaaggaaagggaattttaatgggttttgtaggaatcgggttgggggtcgaaagcggagagcgggtgtgggaaggcggtcgggtttagggaaggggtgtttggagagggaaggggaaggtaatattaattcggaatttagagtagggtaggatttcggtagattttcgtttggggtttttttgtgtttgtttttattgttgttttttcgttttgttttaattgtgggagcgggttggcgggatcggattgggggcgtttattttgtttttttggatttggggttggttggggtggaggaggttggtggggaggcgcgggtcggatttcgggaagttttcgcgcggtgtt

SEQ ID NO: 18 - DNA, 2700 bp, Artificial Sequence
  chemically treated genomic DNA (Homo sapiens)
ggtttttaattcggtttttgtaaaatttattgaagttttttttttttttttttttttagttttataaaattcgttggtagggtttgtgggagtcgcggggttttgttaatttcggggttgggtcgggagtcgagcgtaggcggtcggagggtaatggagtaagcgatagttttaggcgtttttgggttttcggttgggagggaagagtcgaggattttgggtcgtatcgcgtagatggagacgcgtttttagagttttcgggtaggtttagggatttcgcgatttgttttggtttagcggtgtgatttcgcgggttttggcggttttgattgttcgtaggggaggggcgcgttatttttggttgttttaggatgcgtcgtttgaattttttttttttcgcgggtagcgttcgttatatttttcgggtttttcggaaattttaattattttattaggattattggggtttggggtagtttttcgggagtcgcgtggacgagttttggttaggtgggagcgaagagtttcggcgattgttagttttttcgttttcgtatcgtcgggaaaggatggcgttttaatagataggtagtaagtttatcgaggttgaagaatgaagtttttttagggtcggcgggttttgagattaatgagtttaataagaaaattaagtagggttatgatttagaaattaaagaatacggggttaggagaagaggttagttacgatataggtagcggttcgttttttttcgattttttaaaggcgttttttttttagtttttttcgattttagggatttgtaatttgggatttaaagttttcgagagggtagaacgattatttaaaacgaattgcgttagcgagtgttgtcgttttttttaacggttttggaagattatcgtttcgggttttaggcgcgttttgtttcgtgtttattttcgatattatttttaagagcgttatcgcggagcgggcgttttttggacgttgcggggttattcgggttcggtaggttattcgggttcggtagatttcgggcgggttttgagggttgagttaggtttaagagggcgggcggggtcgcggggtatcgataggtcgagggtagggaattgattcggtttacgtagattttcgcgtcgtttttttttcgtttatcgtagttattggtcgattttcgattcgttttttgttttttggggtcgtttatttaatttattagttttttaaattttttttgggattttagtggcgagtattcgtcgttggttttttagggtaggtagtattgtcgttttaggcgtgcggagtcggggagaaaaaaatcgaatacgtgtgttatttagggtttttagataagttttttcgcgcgtatatatattttgaatcggagtttagaaggtcggattcgcgtttcggggtcgagttttttatttttcgtttttagttcggaagattttagtttgttcgaaggcggcgtttgattcgttggtggatttggtgggtgtttgtttttgatatttggggacgaggcgggagcgttttgagcgttgggaagtttcgtttcgcgagttttcggtagtgatacgtgggagcgttgggttcggtattttcgacgttttcgaggtttcgggtggtcgttttgttttttcgggggtttttattttttaagtggttttaaacgatcgaggatgggtttttcgcgtcgtcgtagttgttatttttttcgggaaaggttagcgattttggacgcgtaggttttgaaaattaaggtttagatttatatcgagcgtttaaagatcgtatttgaatttttttcgtcggttattgagggagagaaaggaacgtttagttttatttatatttatagaaagaagcgtcgagggtgggggaaacgtagttttgtcgggtgagtcgggataggtttttcgtttgtttttcggtcgttgtttttttttagttgaatggggagcgattcgtttcgggcgcggttttcggggttgaagattgaggtgtagttttattttcggtttggtagcggtttggaagagagagggaaaggaggaatatttattcggttaagagacgtcgttagagtttttaaagttggcgggggacggaggtcggggtttcggatttttagagcgttcgtagtcgggtttttgggtttttcggtgcggggaatttgattttgtagttttcgttagggcgcggcggggttgtaagaagggaggaaggagtgggattagagttttcgagggcgcgggcggcgtgtatttagttttgttttttcgcgcgttttgtcgtttgtttgttttttttgttgtatcgggtggttttggttttcgcgttcgttcgttttcgacgttttcgcgtggtttcgcgttgttcgcggttagtttcgtttcgtttcgtaaggagcgtgttgtttttttaatcgaaatgggattaagattttagggttttttcgtttttttgttttgaggtgataggattttagttaatagatcgaaaacgtgaaaagtattcgtcgttttttgttttaagtgtttttgtggaaggattatttatttggaaaagtagaataaattttgttgtcgtttttttttcggaggcgtgtttattttagagtttttagatttattggtattcgttatatttttttttgggttttataggtaggattttaagaatga

SEQ ID NO: 19 - DNA, 2700 bp, Artificial Sequence
  chemically treated genomic DNA (Homo sapiens)
ttatttttgaaattttatttgtaaagtttaggaggaagtatagcgaatgttagtgggtttaggagttttggggtgagtacgttttcggaaggaaaacggtaatagaatttattttgtttttttaagtaaatgatttttttatagaggtatttgggataagaggcgacgggtattttttacgttttcgatttattggttaagattttattattttaaaataaggagacgaggaaattttgggattttgattttatttcgattgagaaaataatacgttttttgcgaagcgaaacggggttggtcgcgggtagcgcggaattacgcgaaggcgtcgggggcgggcgggcgcggggattagggttattcggtgtagtaaagggggtaagtaggcggtagggcgcgcggggagataaggttgagtgtacgtcgttcgcgttttcgaaggttttagttttatttttttttttttttttgtagtttcgtcgcgttttggcgaaggttatagggttaggtttttcgtatcgaggagtttagaagttcggttgcgggcgttttgaagattcgggatttcggttttcgtttttcgttagttttagggattttggcggcgttttttagtcgggtagatgtttttttttttttttttttttttaagtcgttgttaggtcgggggtgaggttgtattttagtttttagtttcgaaggtcgcgttcggggcgggtcgttttttatttagttaagaggaagtagcggtcggggggtaggcgaggaatttgtttcggtttattcggtaagattgcgttttttttattttcggcgtttttttttgtgaatgtgaatggaattaagcgttttttttttttttttaatggtcggcgaggagaatttaaatgcggtttttgggcgttcggtatgggtttggattttggtttttagagtttgcgcgtttaaggtcgttagtttttttcgaaggaagtgatagttgcggcggcgcgggaggtttattttcggtcgtttaaagttatttaaggaataaaagttttcgagagagtaaaacgattattcgaaatttcggaagcgtcgggggtgtcgggtttaacgtttttacgtgttattgtcggggattcgcgaggcgaagttttttagcgtttaaggcgttttcgtttcgtttttaggtattaggaatagatatttattaggtttattagcgggttagacgtcgttttcgggtaggttgggatttttcgaattgggagcggagagtaaggggttcgatttcgggacgcgagttcggttttttggatttcggtttagggtgtgtgtgcgcgcggaggggtttatttgggggttttgggtagtatacgtgttcggttttttttttttcgatttcgtacgtttggagcggtaatattgtttgttttagaaggttagcggcgagtgttcgttattagggttttagggagggtttggaaaattgatgagttaagtgagcgattttaggggatagagggcgagtcgagagtcggttaatggttgcggtgggcggggagaagacgacgcggggatttgcgtgggtcgggttaattttttattttcgatttgtcgatgtttcgcggtttcgttcgtttttttaagtttggtttagtttttagggttcgttcgaagtttatcgagttcgagtggtttatcgagttcgagtggtttcgtagcgtttaggaggcgttcgtttcgcggtggcgtttttggaggtggtgtcggaggtaggtacgggataggacgcgtttggggttcggggcggtggttttttagggtcgttggggagggcggtagtattcgttggcgtagttcgttttggatggtcgttttgttttttcgggggttttgaattttaagttgtagatttttgaggtcggaggaggttaggagaagggcgtttttggaggatcgggaggagacgggtcgttgtttgtgtcgtggttgatttttttttttgatttcgtgttttttaatttttgagttatgattttgtttggtttttttattgggtttattgattttaagattcgtcggttttgaaggggttttattttttagtttcggtgaatttgttgtttgtttattaaaacgttattttttttcggcggtgcgggggcgggaggattggtagtcgtcgaggtttttcgtttttatttggttagggttcgtttacgcggttttcgaggggttattttaggttttaatagttttggtagaatgattggagttttcgaggaattcggggaatgtggcggacgttgttcgcgagggaaaagaggtttaggcggcgtattttagggtagttaaaagtggcgcgttttttttttgcgggtagttaggatcgttaggattcgcggggttatatcgttgggttagagtaggtcgcggggtttttggatttgttcgggggttttgggagcgcgtttttatttgcgcggtgcgatttagggttttcggttttttttttttagtcgagggtttaggagcgtttggagttgtcgtttgttttattgtttttcgatcgtttgcgttcggttttcggtttagtttcgaggttggtagggtttcgcggtttttatagattttattaacgagttttgtaggattgagaagaaggaaggaaagggaattttaatgggttttgtaggaatcgggttgggggtt

SEQ ID NO: 20 - DNA, 280 bp, Artificial Sequence
  chemically treated genomic DNA (Homo sapiens)
tagagttttcgagggcgcgggcggcgtgtatttagttttgttttttcgcgcgttttgtcgtttgtttgttttttttgttgtatcgggtggttttggttttcgcgttcgttcgttttcgacgttttcgcgtggtttcgcgttgttcgcggttagtttcgtttcgtttcgtaaggagcgtgttgtttttttaatcgaaatgggattaagattttagggttttttcgtttttttgttttgaggtgataggattttagttaatagatcgaaaacgtgaaaagta

SEQ ID NO: 21 - DNA, 280 bp, Artificial Sequence
  chemically treated genomic DNA (Homo sapiens)
tattttttacgttttcgatttattggttaagattttattattttaaaataaggagacgaggaaattttgggattttgattttatttcgattgagaaaataatacgttttttgcgaagcgaaacggggttggtcgcgggtagcgcggaattacgcgaaggcgtcgggggcgggcgggcgcggggattagggttattcggtgtagtaaagggggtaagtaggcggtagggcgcgcggggagataaggttgagtgtacgtcgttcgcgttttcgaaggtttta

SEQ ID NO: 22 - DNA, 1968 bp, Artificial Sequence
  chemically treated genomic DNA (Homo sapiens)
attttttaaaattttataagtgttttaggaatgatttggtgttttttatgtttttagagtttaggttttttgtgttttatgtagtgtatagatttgtttttgggttattttttatattaaattttagttttttttattgggtataaagggaaattttaaaattttgttttttatggaaaaatgttttttgtttttcggggtagattttgtagggagagatttgtaaatatgaaggaggagtggaaggtgtgatcggagaaaatattaaggattgaagtgtgaaggggtatgggatggattggaggtagttttgagatgagagtttgttgaattcgtgtttcgggagattaagttggttttttttggaaaaaatttgtaagtttgggaaagttgggattggtttttattataagtagttgggatttaagtttatttgtattagggttattttagtttagttttgttgggaatcgtatcgggatgggtgtgggacggtttcgaatttagattcgggtgttgttttttttaggtagtttttcggagtttgttttttggattataaaatgaagagttgtgaagagttaataatgttaagttggaagggtttgatacggaatttgattaaggttggatttttaataattgtgattttttttttttttttttttttttggtaaaattattttacgaatttacgtaagtagggtttttcgttatttttcggagtagtcgtttgagggttggaaggagtagtgatagaaattttagagacgtagagatttttcgaatttcgaattcgattattgttttttttcgatcgtcgaattcgttggagaagcgggcgcgatagggcgatgagttaacgcggagggagcgcggaggtcgcggaagtcgggggcgttgggttttaggttcggatgttgagcgcggatcggcgtgttttttttatagcgttttcgcgcggttttttttcgttgcgtttcgtacggcgattcgtcgcgggtagttttggcgtttggttacgtcgtcggttgaggatcgttagagttggggggagattaaagtatttttatggggtttaaagagtttgggattgtagtgttgttagtttggtttcgtcgcgttaataaattttcggcgaaagttgggagtaggagtggaggtttggggcgggggttggtggggcgcgggggttggtcggagggagggttcgggggttttttgtatttgcgtttttgtcgcgttaagttagtgggaagtaagtgatattttttttttattcgtttttttggaatttgtttattttttttttttagaatatcgtttgtttttcggggttagtattattaaagagaagattttttttaggtttttaaaatttacgtggcgttttgttataaggagcgcgttggaagttggttttggtatttttttgtttttttttttttttgtttcgtttttatattttcgtggagaaattttcgagtaggttttttgtatttttttattttatttagaattataaaaaatatatgggaaggtgatttggttttattttaatttttttattttgtagaagtttaaagtggtgatggtgagaaaagtggtttaaggttaagggttattttagttggtaaaattaggagtagaataggagaatttttagagttttattatatattttttgttatttattttatggataaaaataattatttttttaggtaggttaagtattttttaaaggtgtttgtgtttttgttagttggttgtaaaatttagtattatatttgttatttggatattatggggagtcgttggttatttaacgatagagtcgagtatattttgattttttttttgagatattttttttttatttttattttattttgaaaaatattatggagtatgtgttttgggtaagtttttttttaggcgtgggtaaaatttgagtatagggatttt

SEQ ID NO: 23 - DNA, 1968 bp, Artificial Sequence
  chemically treated genomic DNA (Homo sapiens)
agaatttttgtgtttaaattttatttacgtttgggagaagatttgtttagaatatatgttttatagtgttttttaggatggagtgggagtgagaaaggagtgttttagaggagggattagagtgtattcggttttgtcgttggatagttagcgattttttatgatgtttaggtgataagtgtgatgttaagttttgtagttaattggtaaaagtatagatatttttaaagagtatttgatttgtttaagagaatgattatttttgtttatgaaataagtagtaaaaaatatatagtaagattttagggatttttttgttttatttttggttttgttaattgaagtaatttttgattttgggttattttttttattattattattttaggtttttgtaaaatgaagaggttgaagtgaaattaaattatttttttatatattttttgtagttttaagtggggtgagaaaatgtaaaaggtttgttcgggggtttttttacggggatgtgggggcggggtaggagaaagaggggataaggagatattaaagttagtttttagcgcgttttttgtaataaggcgttacgtaaattttaagggtttggaggaaattttttttttgataatgttgatttcggagagtaggcggtgttttaaaggagggagatgagtaagttttaagggggcgggtgaaagggaaatgttatttgttttttattgatttaacgcggtaggagcgtaggtgtaagaaattttcggatttttttttcggttaattttcgcgttttattaattttcgttttaagtttttatttttgtttttaattttcgtcgaaaatttattgacgcggcgaggttaggttaataatattgtaattttaggttttttgggttttataggaatgttttgatttttttttagttttagcggtttttagtcgacggcgtggttaaacgttagggttattcgcggcgggtcgtcgtgcggggcgtagcgggaggaggtcgcgcgggggcgttgtggggaggatacgtcggttcgcgtttagtattcgggtttgagatttagcgttttcggttttcgcggttttcgcgtttttttcgcgttaatttatcgttttgtcgcgttcgtttttttagcgggttcggcggtcgggggaggatagtgatcgagttcgaagttcggagggtttttgcgtttttggggtttttattattgttttttttagtttttaagcggttatttcgaagaatgacgaagggttttatttgcgtagattcgtgggatgattttattaagaaggaaaagggggaaaagaaattataattattgagggtttagttttggttagatttcgtgttagatttttttaatttgatattattgattttttataattttttattttgtagtttaggaagtaggtttcgagagattgtttagaaaaaatagtattcggatttgaattcgaggtcgttttatatttatttcggtacggtttttagtagaattgagttggagtggttttgatgtaaatgaatttagattttagttgtttgtgatggaagttaattttagtttttttaagtttataggttttttttagaagaagttaatttgatttttcggaatacgaatttagtaggtttttattttagaattgtttttaatttattttatatttttttatattttagtttttggtatttttttcgattatattttttattttttttttatatttgtaagtttttttttgtagaatttgtttcgaggagtaaaggatatttttttatggggaatagaattttagaatttttttttgtatttagtgagaaagattaaagtttggtataggaaataatttaaagataaatttatatattgtatagaatataggaagtttgggttttgaaaatataaaagatattaaattatttttggagtatttgtgaagttttggaaaat

SEQ ID NO: 24 - DNA, 1368 bp, Artificial Sequence
  chemically treated genomic DNA (Homo sapiens)
ggaggtagttttgagatgagagtttgttgaattcgtgtttcgggagattaagttggttttttttggaaaaaatttgtaagtttgggaaagttgggattggtttttattataagtagttgggatttaagtttatttgtattagggttattttagtttagttttgttgggaatcgtatcgggatgggtgtgggacggtttcgaatttagattcgggtgttgttttttttaggtagtttttcggagtttgttttttggattataaaatgaagagttgtgaagagttaataatgttaagttggaagggtttgatacggaatttgattaaggttggatttttaataattgtgattttttttttttttttttttttttggtaaaattattttacgaatttacgtaagtagggtttttcgttatttttcggagtagtcgtttgagggttggaaggagtagtgatagaaattttagagacgtagagatttttcgaatttcgaattcgattattgttttttttcgatcgtcgaattcgttggagaagcgggcgcgatagggcgatgagttaacgcggagggagcgcggaggtcgcggaagtcgggggcgttgggttttaggttcggatgttgagcgcggatcggcgtgttttttttatagcgttttcgcgcggttttttttcgttgcgtttcgtacggcgattcgtcgcgggtagttttggcgtttggttacgtcgtcggttgaggatcgttagagttggggggagattaaagtatttttatggggtttaaagagtttgggattgtagtgttgttagtttggtttcgtcgcgttaataaattttcggcgaaagttgggagtaggagtggaggtttggggcgggggttggtggggcgcgggggttggtcggagggagggttcgggggttttttgtatttgcgtttttgtcgcgttaagttagtgggaagtaagtgatattttttttttattcgtttttttggaatttgtttattttttttttttagaatatcgtttgtttttcggggttagtattattaaagagaagattttttttaggtttttaaaatttacgtggcgttttgttataaggagcgcgttggaagttggttttggtatttttttgtttttttttttttttgtttcgtttttatattttcgtggagaaattttcgagtaggttttttgtatttttttattttatttagaattataaaaaatatatgggaaggtgatttggttttattttaatttttttattttgtagaagtttaaagtggtgatggtgagaaaagtggtttaaggttaagggttattttagttggtaaaattaggagtagaataggagaatttttagag

SEQ ID NO: 25 - DNA, 1368 bp, Artificial Sequence
  chemically treated genomic DNA (Homo sapiens)
ttttagggatttttttgttttatttttggttttgttaattgaagtaatttttgattttgggttattttttttattattattattttaggtttttgtaaaatgaagaggttgaagtgaaattaaattatttttttatatattttttgtagttttaagtggggtgagaaaatgtaaaaggtttgttcgggggtttttttacggggatgtgggggcggggtaggagaaagaggggataaggagatattaaagttagtttttagcgcgttttttgtaataaggcgttacgtaaattttaagggtttggaggaaattttttttttgataatgttgatttcggagagtaggcggtgttttaaaggagggagatgagtaagttttaagggggcgggtgaaagggaaatgttatttgttttttattgatttaacgcggtaggagcgtaggtgtaagaaattttcggatttttttttcggttaattttcgcgttttattaattttcgttttaagtttttatttttgtttttaattttcgtcgaaaatttattgacgcggcgaggttaggttaataatattgtaattttaggttttttgggttttataggaatgttttgatttttttttagttttagcggtttttagtcgacggcgtggttaaacgttagggttattcgcggcgggtcgtcgtgcggggcgtagcgggaggaggtcgcgcgggggcgttgtggggaggatacgtcggttcgcgtttagtattcgggtttgagatttagcgttttcggttttcgcggttttcgcgtttttttcgcgttaatttatcgttttgtcgcgttcgtttttttagcgggttcggcggtcgggggaggatagtgatcgagttcgaagttcggagggtttttgcgtttttggggtttttattattgttttttttagtttttaagcggttatttcgaagaatgacgaagggttttatttgcgtagattcgtgggatgattttattaagaaggaaaagggggaaaagaaattataattattgagggtttagttttggttagatttcgtgttagatttttttaatttgatattattgattttttataattttttattttgtagtttaggaagtaggtttcgagagattgtttagaaaaaatagtattcggatttgaattcgaggtcgttttatatttatttcggtacggtttttagtagaattgagttggagtggttttgatgtaaatgaatttagattttagttgtttgtgatggaagttaattttagtttttttaagtttataggttttttttagaagaagttaatttgatttttcggaatacgaatttagtaggtttttattttagaattgttttt

SEQ ID NO: 26 - DNA, 336 bp, Artificial Sequence
  chemically treated genomic DNA (Homo sapiens)
taggtagtttttcggagtttgttttttggattataaaatgaagagttgtgaagagttaataatgttaagttggaagggtttgatacggaatttgattaaggttggatttttaataattgtgattttttttttttttttttttttttggtaaaattattttacgaatttacgtaagtagggtttttcgttatttttcggagtagtcgtttgagggttggaaggagtagtgatagaaattttagagacgtagagatttttcgaatttcgaattcgattattgttttttttcgatcgtcgaattcgttggagaagcgggcgcgatagggcgatgagtta

SEQ ID NO: 27 - DNA, 336 bp, Artificial Sequence
  chemically treated genomic DNA (Homo sapiens)
taatttatcgttttgtcgcgttcgtttttttagcgggttcggcggtcgggggaggatagtgatcgagttcgaagttcggagggtttttgcgtttttggggtttttattattgttttttttagtttttaagcggttatttcgaagaatgacgaagggttttatttgcgtagattcgtgggatgattttattaagaaggaaaagggggaaaagaaattataattattgagggtttagttttggttagatttcgtgttagatttttttaatttgatattattgattttttataattttttattttgtagtttaggaagtaggtttcgagagattgttta

SEQ ID NO: 28 - DNA, 1900 bp, Artificial Sequence
  chemically treated genomic DNA (Homo sapiens)
aaaaatttatttgttgaattgagtggttttggttttagatggttaggtagtttaaaaatatgaagttgaagatggtagttatttaaaaattgttttattgttatttttatgacgataagaaagtaagtagaggtaagggtgttaaatttagaaatagtatataggaatgaataatttttggggatttttattggtagattttaaaaggtaaattttttagtttgatgtgaattattttttgtgattttttttttttaatttattttgatatttttatatttttatggggaaaagttgttttattatatagttaatcggtggattaggtaatttatgggagtgttgaaagtcgaaattttaggttgggtttgtggtaaaatttttaattttatttttagttaatagaatgttataatgagggaaaatatttagtaagttgaaaatatagaataaggaagcggaaagaaattttagtgataatgttattaagtggaaagaaggaaagtggtttattttttaggaaaataaatattgatttttttatagttatattttaagcgtattggttaaggtatgttttgttttgaaaaattattagaggttatagcgtggtttttttcggttacgtatagcgagttcgttattatagtgtttttagagggtatacgattttatttttttatttaattttttattcgtgttttttttttgggtttttgtggtatttatatagtagtttttgttttgttgttttttggatttttagtttttattatatttggcggtttttaggaagtttgaataaatttcgacgcgattaaaggagaggaaagtttgtttgttattttgggtggattagagataatatttttaggggatagggcgttatatggtagtttaaggcgtagtgatattcgagtttgatataattaatattagtttcgttaggtggtttttcgatgtttatttttttattaaataagatttatattcgtttaataagattttgggataattttaattttcgttttttagtaaggcgcgcggttggttagtcggggcgggaagttggttttgcgttaaggattcgtagttttagtagtagtagattaggtagaagtgtttttttatttttattttaagtttttttagaaattgtcgttagagtagatataaggttttggttggggtattattttttgggtgggtggggaggggagaagagataattaaaagttagttgaattgagaaaggaatttggtgaatttttttattttgtttaatagttaaagatttttttatttttaatttagttttttcgatttttaaattagttattacggaagtttatcgttgttttttaatttaacgcggaaaattttatcgttggggattttaaataggtgtttagtaagttgtgtgtcggattggggcggtcggtttcggtaatatttggtaatttttgggtgtttttaggcgtgtggttgtcggtttatttttcgagggcgttcggaggcgaagtatttaagcgggttttcgtatttagcgggcgggattttggcgggtttcgcgcgaagattcgggttttggttcgagcgaatggcgtttaaatttcggtttggggagaatgacggtttgaattgcggcggggcgttttttttatcgtagaaagtgtgggtacgtagaaattcgcggtaggagagttttaagtggagcgtagtttgatagcgtttgtttttgaattcgtgtcggatcgaggggacgttatttagcgggtagggtgacgttatcgtttttttgatattttatattaaagggttggtatgttatagggagggagggggagagcgaaagttagcgcgagtaatagagagatttttttttagtaggtacgaaagt

SEQ ID NO: 29 - DNA, 1900 bp, Artificial Sequence
  chemically treated genomic DNA (Homo sapiens)
gttttcgtgtttgttgagaaaggatttttttgttgttcgcgttggttttcgttttttttttttttttttgtaatatgttagttttttaatgtggagtgttagggagacggtgacgttattttgttcgttgggtggcgttttttcggttcgatacgagtttagagatagacgttgttagattgcgttttatttggggtttttttgtcgcgggtttttgcgtatttatattttttgcggtggaggggacgtttcgtcgtaatttaggtcgttattttttttaggtcggggtttgagcgttattcgttcgggttagagttcggattttcgcgcggagttcgttagagtttcgttcgttggatacgaggattcgtttggatgtttcgttttcgagcgttttcggaagatgggtcggtagttatacgtttaaagatatttagaggttattaggtattgtcggaatcggtcgttttaattcggtatatagtttgttgggtatttatttgagatttttagcggtaggatttttcgcgttaggttgaggggtagcggtgggttttcgtggtgattggtttgggagtcgggagaattaagttgggggtgggggggtttttggttgttgggtaggatagggaagtttattaggttttttttttagtttaattaatttttaattgtttttttttttttttttatttatttaaaaaataatgttttaattaaaattttgtgtttgttttgacggtagtttttgggagggtttggggtaaaagtgaggagatatttttgtttggtttattgttgttaaggttgcgagtttttaacgtagagttagtttttcgtttcggttggttagtcgcgcgttttgttggggagcgagagttggaattattttagggttttattaagcggatatgaattttgtttggtagggaaatgagtatcgaagggttatttgacgaagttagtgttggttgtattagattcgggtgttattgcgttttgaattgttatgtaacgttttgttttttggaaatattgtttttgatttatttaaagtgataagtaggttttttttttttttgatcgcgtcgaggtttgtttaagttttttggaggtcgttaaatgtaatgagaattgaggatttagggggtagtaggatagaggttgttgtatagatgttataggggtttagagagaggatacggataagaaattgggtgagggagtaagatcgtgtattttttgaaagtattgtaatagcgaattcgttgtacgtggtcgaaaggggttacgttatggtttttggtgattttttagggtaaagtatgttttggttaatgcgtttgagatgtagttgtggaaagattagtgtttgtttttttagggagtgagttattttttttttttttatttagtggtattgttattaaaattttttttcgtttttttgttttgtatttttaatttattgaatatttttttttattgtggtattttgttgattggaggtgaagttagaaattttattatagatttaatttgggatttcgatttttaatatttttatagattatttagtttatcgattggttgtatggtggggtagtttttttttataaagatatagagatattaaaataaattaggggaaaagagttatagaaggtggtttatattaagttaaaaaatttgttttttgaagtttgttaatgaagatttttaagaattgtttatttttgtgtattgtttttgggtttaatatttttgtttttatttatttttttatcgttatggaaatgatagtaaaatagtttttaaatgattattatttttaattttatgtttttaagttatttaattatttgagattagaattatttagtttagtaagtaggttttt

SEQ ID NO: 30 - DNA, 1002 bp, Artificial Sequence
  chemically treated genomic DNA (Homo sapiens)
ttattatatagttaatcggtggattaggtaatttatgggagtgttgaaagtcgaaattttaggttgggtttgtggtaaaatttttaattttatttttagttaatagaatgttataatgagggaaaatatttagtaagttgaaaatatagaataaggaagcggaaagaaattttagtgataatgttattaagtggaaagaaggaaagtggtttattttttaggaaaataaatattgatttttttatagttatattttaagcgtattggttaaggtatgttttgttttgaaaaattattagaggttatagcgtggtttttttcggttacgtatagcgagttcgttattatagtgtttttagagggtatacgattttatttttttatttaattttttattcgtgttttttttttgggtttttgtggtatttatatagtagtttttgttttgttgttttttggatttttagtttttattatatttggcggtttttaggaagtttgaataaatttcgacgcgattaaaggagaggaaagtttgtttgttattttgggtggattagagataatatttttaggggatagggcgttatatggtagtttaaggcgtagtgatattcgagtttgatataattaatattagtttcgttaggtggtttttcgatgtttatttttttattaaataagatttatattcgtttaataagattttgggataattttaattttcgttttttagtaaggcgcgcggttggttagtcggggcgggaagttggttttgcgttaaggattcgtagttttagtagtagtagattaggtagaagtgtttttttatttttattttaagtttttttagaaattgtcgttagagtagatataaggttttggttggggtattattttttgggtgggtggggaggggagaagagataattaaaagttagttgaattgagaaaggaatttggtgaatttttttattttgtttaatagttaaagattttttt

SEQ ID NO: 31 - DNA, 1002 bp, Artificial Sequence
  chemically treated genomic DNA (Homo sapiens)
gggggggtttttggttgttgggtaggatagggaagtttattaggttttttttttagtttaattaatttttaattgtttttttttttttttttatttatttaaaaaataatgttttaattaaaattttgtgtttgttttgacggtagtttttgggagggtttggggtaaaagtgaggagatatttttgtttggtttattgttgttaaggttgcgagtttttaacgtagagttagtttttcgtttcggttggttagtcgcgcgttttgttggggagcgagagttggaattattttagggttttattaagcggatatgaattttgtttggtagggaaatgagtatcgaagggttatttgacgaagttagtgttggttgtattagattcgggtgttattgcgttttgaattgttatgtaacgttttgttttttggaaatattgtttttgatttatttaaagtgataagtaggttttttttttttttgatcgcgtcgaggtttgtttaagttttttggaggtcgttaaatgtaatgagaattgaggatttagggggtagtaggatagaggttgttgtatagatgttataggggtttagagagaggatacggataagaaattgggtgagggagtaagatcgtgtattttttgaaagtattgtaatagcgaattcgttgtacgtggtcgaaaggggttacgttatggtttttggtgattttttagggtaaagtatgttttggttaatgcgtttgagatgtagttgtggaaagattagtgtttgtttttttagggagtgagttattttttttttttttatttagtggtattgttattaaaattttttttcgtttttttgttttgtatttttaatttattgaatatttttttttattgtggtattttgttgattggaggtgaagttagaaattttattatagatttaatttgggatttcgatttttaatatttttatagattatttagtttatcgattggttgtatggtgg

SEQ ID NO: 32 - DNA, 276 bp, Artificial Sequence
  chemically treated genomic DNA (Homo sapiens)
tatacgattttatttttttatttaattttttattcgtgttttttttttgggtttttgtggtatttatatagtagtttttgttttgttgttttttggatttttagtttttattatatttggcggtttttaggaagtttgaataaatttcgacgcgattaaaggagaggaaagtttgtttgttattttgggtggattagagataatatttttaggggatagggcgttatatggtagtttaaggcgtagtgatattcgagtttgatataattaatatta

SEQ ID NO: 33 - DNA, 276 bp, Artificial Sequence
  chemically treated genomic DNA (Homo sapiens)
tagtgttggttgtattagattcgggtgttattgcgttttgaattgttatgtaacgttttgttttttggaaatattgtttttgatttatttaaagtgataagtaggttttttttttttttgatcgcgtcgaggtttgtttaagttttttggaggtcgttaaatgtaatgagaattgaggatttagggggtagtaggatagaggttgttgtatagatgttataggggtttagagagaggatacggataagaaattgggtgagggagtaagatcgtgta

SEQ ID NO: 34 - DNA, 3100 bp, Artificial Sequence
  chemically treated genomic DNA (Homo sapiens)
cgttttttttagaggagaaaagatttggtttacgttttttagaggttttatttggtgaagaggaggagtagttattgtagcgcggtggatagggtgttttggttggcgtcgaagatgttagtgatagtggtcggtacgttttttaaatttagtcgcgcgttattatcgtgcgagttttcggtcgttttttttttcgtagagaggataaaggcgtttattatgtcgcggggggcggtttcgggtcgaaggttttcgtagtgttttaagaatttgtttaggatgaagttgttgaagttgcggttgagttgttcgaattcgcggaaaacggtgcgtatcgggttggggaagtattgtagttagggtattacgtttattaggttgttcgcgtttatcgtgcgttcgaatttttcgttgtggttgagtagtttacggaattcggggtcgtcgtggttgtagcggtagtcgaaatatacggtatttatgacgttggttacggttacgacggttagcggtttcgggtcgaggaaggcgtcgttcgcgttgtcgcgtattagtagcgttattagttcgcgcgtttcgtttagtacgtggttttcgaggatttggcggttgcgcggttggcgcgtgaagaagttgcgtattatgttgtgggttgcgcgtcgttgtattttttagtgtttcgagtagtggtcgaaagttatgttgcggtcgtcggatattatacggaaggaggcgaaggtcggtcggtcggcgaaggtcgagttttgttgtattagggtttggtggatggcgcgttcgttatttagtattattatggggtagttgtttaggcggatttggaaaacgtcgtcgtagcgtcgcgttaggcgagcgaacgagaggtgagtcgtttggtttatcgtcgtcgcgttttcgattagtggttacgtaaacgggttcgggggcgcggatcggagttgtcgttttcgttgttttagtagtcgttggtttatatgtatagtggttagtatcgataggagtagtaggagcgtggtttgttggatggatagcgggtttagcggttaagggtcgttcgggttgaggttggtgtttatgttggggatagagaggagaaggcgtgatatttaggggtgtagagataggagcgggcgttttacgtttttattttagtttttggggattgagtgtcgttgggtggagaggtcggagttgattttttggagaaatggtcgaagacgtttttttttatttttaatttatttttttttggagaagagaaggggcgtgtttttatttcgttgtaatttagcgttaaatttttttttttttcgtaaggcgcgtaacggtttttgtaatttggggataacgttgcgggtatcgaggcggtggcgtttgattttttttaaagtatttattacgttattcgttatttgtaataatttatttgaagaggtcgtcgggtagcgtttcggtagatagattgatttgcggggaggtgcggtttttagtggcgcgggatagtcggtttcgagaaggaattgggatttttgtttagggtaagacgttaataggaattcgtagttcggtttggatatttgttgtttttattggaagttttaatttttattcgagttttttggcgtcgttagtgttaggagcgtttggattgggatggggacggagaagggtgtttcgttcgtcgagtttcgttgtttttggggatttggtaaagtcgaggtttttttatagcgttgagattgagattgggggtcggtgagtggcgttaatttttatgtttttgcggtttttataattggagtcgtagaagcgttcgtttttatttttattttagagttaaagcgcgttatttcgttttttcgggttttaaggattgggtagaaggagggtagcgcgatttggtagggcggggtttgcggggggcggggcgcgtcgtatattaggtcgttttgattcggattttcgtttaggcgtatcggtcggtttcggagttttattagtaggtttttatgggagcggaggtgtttacgtttttattgtgcggtaatcgcgttttattatagttatttttaatcgaggtcgtacggtgtttttagaattacgttcggtataatttgtttcggtcgttgcgttcgatttgggagcgcgtttcgtttcgagcgtacgatttttttttttttttcgcgatttgagtttgtttttcggaaagttagtgtagtggtagcggtttgttttatagcgtttttggttggttgtttaaattttattttaggttttcgtaaataaattgttattttagtggaggttttttggtatgttaaattttttttagtttttgcggcgagattaggaatttttaaaagtagtcgttttttcgtttcggggtttcgatagtgtttgggtatataaaggtttttggggcgtagttggttttgagatttttcgcgtagaggttattttaggtggcgtcgttcgttggtgggcgcggggtcgtttaggttgcgatggaagtcgttggcgtagggcggggagttaagttggggcgattgggggggtttgggggagttagcggggcgggattcgagcggggcggagagtggtaggaggaggcgaattttcgcgtttcggcgaattttatcgggttgaagtttttgttgtcgttttttttttgcgtgcggagttgggttttgcgtgcgtcgtttttggaaagtcggttttagttatatttttgggcgttgtttgcggtcgtttttttcgcgttttttacggtatttgatacgcggaggcggcggtcgagggtggggtgtcggttattattatttttggcgtggggtgtcggtcgttattattttcggttgcgtacgtatagtcgcgtttgttaggttagcgaggcggacgtttgggttattattcgtaggtcgagttcgggcgcgtatcgttatttcgttgcgtatcggcggttttgtggtttttttgggcgcgtttgcggtcgcgaagggggttttttttttataagggaagtcggaggcgtttgggcgggggtggtttttttcgtttggcgcgtttttttttatatgttgat

SEQ ID NO: 35 - DNA, 3100 bp, Artificial Sequence
  chemically treated genomic DNA (Homo sapiens)
attagtatgtaggaaagggcgcgttaggcgggggaagttattttcgtttaagcgttttcggttttttttataaagggagggtttttttcgcgatcgtaagcgcgtttaggaagattatagagtcgtcggtgcgtagcgaggtggcgatacgcgttcgggttcggtttgcgggtggtggtttaagcgttcgtttcgttggtttggtaggcgcgattgtgcgtgcgtagtcgagggtggtggcggtcggtattttacgttaagggtggtggtggtcggtattttattttcggtcgtcgttttcgcgtgttaggtgtcgtgagaagcgcgggaggagcggtcgtaggtagcgtttagggatatgattggagtcgattttttagaagcggcgtacgtaaagtttagtttcgtacgtaaaggggaggcgatagtagaaattttaattcgataaagttcgtcggagcgcggagattcgtttttttttgttatttttcgtttcgttcgggtttcgtttcgttagtttttttaggtttttttagtcgttttagtttggtttttcgttttgcgttaacggtttttatcgtagtttgggcggtttcgcgtttattagcgggcggcgttatttggagtggtttttacgcgggaaattttagggttagttgcgttttaggagtttttgtgtgtttaagtattgtcggggtttcggggcgggggagcggttatttttagggatttttgatttcgtcgtaagaattggaaaaaatttagtatgttaaagagtttttattgaggtggtaatttgtttgcgagaatttaagataaaatttaaataattaattaggggcgttgtgaggtaaatcgttgttattatattggtttttcgggaagtaagtttaagtcgcggagagggaagggaggtcgtgcgttcggggcggggcgcgtttttaagtcgagcgtagcggtcggggtaggttgtatcgagcgtggttttggggatatcgtgcggtttcgattggaggtggttgtgatgaagcgcggttatcgtataatggaaacgtgggtattttcgtttttatgaaagtttgttggtagagtttcgaggtcggtcggtgcgtttggacgggagttcgggttaaagcggtttggtgtgcggcgcgtttcgtttttcgtaggtttcgttttgttaggtcgcgttgttttttttttatttagtttttaaaattcggaggagcgggatggcgcgttttgattttggagtgggagtgggagcgagcgtttttgcgattttagttgtgagagtcgtaagggtatgggaattgacgttatttatcgatttttagttttaattttaacgttgtgaggaaatttcgattttgttaggtttttaagggtagcggggttcggcgagcgaggtattttttttcgtttttattttaatttaagcgtttttggtattgacgacgttaagagattcgagtgggagttaaagtttttagtgagggtagtaggtgtttaggtcgggttgcgggtttttgttgacgttttgttttaggtaaaggttttagttttttttcggagtcggttgtttcgcgttattggaaatcgtattttttcgtaggttagtttgtttgtcgaggcgttgttcggcgatttttttagatggattattataggtagcgggtggcgtggtaggtattttaaaggaaattaagcgttatcgtttcgatgttcgtagcgttgtttttagattgtaggaatcgttacgcgttttgcggggaggggaagggtttggcgttgggttatagcgaggtggaaatacgtttttttttttttttaagggagagtgggttggggatgggaaggggcgttttcggttatttttttagagagttagtttcgatttttttatttaacggtatttagtttttagaggttggggtaggggcgtggggcgttcgtttttgtttttgtatttttgagtgttacgtttttttttttttgtttttagtatgggtattagttttagttcgaacgatttttggtcgttaaattcgttgtttatttagtagattacgtttttgttatttttgtcggtgttggttattgtgtatgtgggttagcggttgttgaggtaacggaggcggtagtttcggttcgcgttttcgggttcgtttgcgtggttattgatcggaaacgcggcggcggtgggttaggcggtttatttttcgttcgttcgtttggcgcggcgttacggcgacgttttttagattcgtttgggtagttgttttatagtggtgttgaatggcgagcgcgttatttattaggttttggtgtagtagggttcggttttcgtcgatcggtcggttttcgttttttttcgtgtggtgttcggcggtcgtagtatggttttcggttattattcggagtattggaaggtgtagcggcgcgtagtttatagtatgatgcgtaatttttttacgcgttagtcgcgtagtcgttaagttttcgagggttacgtgttgagcgaggcgcgcgagttggtggcgttgttggtgcgcggtagcgcggacggcgtttttttcgattcgaggtcgttgatcgtcgtggtcgtggttaacgttatgagtgtcgtgtgtttcggttgtcgttatagttacgacgatttcgagtttcgtgagttgtttagttataacgaagagttcgggcgtacggtgggcgcgggtagtttggtggacgtgatgttttggttgtagtatttttttaattcggtgcgtatcgtttttcgcgaattcgagtagtttaatcgtaattttagtaattttattttggataagtttttgaggtattgcgaaagttttcggttcggggtcgtttttcgcgatatgatggacgtttttattttttttgcggaaaagaaggcggtcggggattcgtacggtggtggcgcgcggttggatttggagaacgtatcggttattattattgatattttcggcgttagttaggatattttgtttatcgcgttgtagtggttgttttttttttttattaggtaaagtttttgggaggcgtgggttaggtttttttttttttgaaaaaggcg

SEQ ID NO: 36 - DNA, 2500 bp, Artificial Sequence
  chemically treated genomic DNA (Homo sapiens)
ttgagttgttcgaattcgcggaaaacggtgcgtatcgggttggggaagtattgtagttagggtattacgtttattaggttgttcgcgtttatcgtgcgttcgaatttttcgttgtggttgagtagtttacggaattcggggtcgtcgtggttgtagcggtagtcgaaatatacggtatttatgacgttggttacggttacgacggttagcggtttcgggtcgaggaaggcgtcgttcgcgttgtcgcgtattagtagcgttattagttcgcgcgtttcgtttagtacgtggttttcgaggatttggcggttgcgcggttggcgcgtgaagaagttgcgtattatgttgtgggttgcgcgtcgttgtattttttagtgtttcgagtagtggtcgaaagttatgttgcggtcgtcggatattatacggaaggaggcgaaggtcggtcggtcggcgaaggtcgagttttgttgtattagggtttggtggatggcgcgttcgttatttagtattattatggggtagttgtttaggcggatttggaaaacgtcgtcgtagcgtcgcgttaggcgagcgaacgagaggtgagtcgtttggtttatcgtcgtcgcgttttcgattagtggttacgtaaacgggttcgggggcgcggatcggagttgtcgttttcgttgttttagtagtcgttggtttatatgtatagtggttagtatcgataggagtagtaggagcgtggtttgttggatggatagcgggtttagcggttaagggtcgttcgggttgaggttggtgtttatgttggggatagagaggagaaggcgtgatatttaggggtgtagagataggagcgggcgttttacgtttttattttagtttttggggattgagtgtcgttgggtggagaggtcggagttgattttttggagaaatggtcgaagacgtttttttttatttttaatttatttttttttggagaagagaaggggcgtgtttttatttcgttgtaatttagcgttaaatttttttttttttcgtaaggcgcgtaacggtttttgtaatttggggataacgttgcgggtatcgaggcggtggcgtttgattttttttaaagtatttattacgttattcgttatttgtaataatttatttgaagaggtcgtcgggtagcgtttcggtagatagattgatttgcggggaggtgcggtttttagtggcgcgggatagtcggtttcgagaaggaattgggatttttgtttagggtaagacgttaataggaattcgtagttcggtttggatatttgttgtttttattggaagttttaatttttattcgagttttttggcgtcgttagtgttaggagcgtttggattgggatggggacggagaagggtgtttcgttcgtcgagtttcgttgtttttggggatttggtaaagtcgaggtttttttatagcgttgagattgagattgggggtcggtgagtggcgttaatttttatgtttttgcggtttttataattggagtcgtagaagcgttcgtttttatttttattttagagttaaagcgcgttatttcgttttttcgggttttaaggattgggtagaaggagggtagcgcgatttggtagggcggggtttgcggggggcggggcgcgtcgtatattaggtcgttttgattcggattttcgtttaggcgtatcggtcggtttcggagttttattagtaggtttttatgggagcggaggtgtttacgtttttattgtgcggtaatcgcgttttattatagttatttttaatcgaggtcgtacggtgtttttagaattacgttcggtataatttgtttcggtcgttgcgttcgatttgggagcgcgtttcgtttcgagcgtacgatttttttttttttttcgcgatttgagtttgtttttcggaaagttagtgtagtggtagcggtttgttttatagcgtttttggttggttgtttaaattttattttaggttttcgtaaataaattgttattttagtggaggttttttggtatgttaaattttttttagtttttgcggcgagattaggaatttttaaaagtagtcgttttttcgtttcggggtttcgatagtgtttgggtatataaaggtttttggggcgtagttggttttgagatttttcgcgtagaggttattttaggtggcgtcgttcgttggtgggcgcggggtcgtttaggttgcgatggaagtcgttggcgtagggcggggagttaagttggggcgattgggggggtttgggggagttagcggggcgggattcgagcggggcggagagtggtaggaggaggcgaattttcgcgtttcggcgaattttatcgggttgaagtttttgttgtcgttttttttttgcgtgcggagttgggttttgcgtgcgtcgtttttggaaagtcggttttagttatatttttgggcgttgtttgcggtcgtttttttcgcgttttttacggtatttgatacgcg

SEQ ID NO: 37 - DNA, 2500 bp, Artificial Sequence
  chemically treated genomic DNA (Homo sapiens)
cgcgtgttaggtgtcgtgagaagcgcgggaggagcggtcgtaggtagcgtttagggatatgattggagtcgattttttagaagcggcgtacgtaaagtttagtttcgtacgtaaaggggaggcgatagtagaaattttaattcgataaagttcgtcggagcgcggagattcgtttttttttgttatttttcgtttcgttcgggtttcgtttcgttagtttttttaggtttttttagtcgttttagtttggtttttcgttttgcgttaacggtttttatcgtagtttgggcggtttcgcgtttattagcgggcggcgttatttggagtggtttttacgcgggaaattttagggttagttgcgttttaggagtttttgtgtgtttaagtattgtcggggtttcggggcgggggagcggttatttttagggatttttgatttcgtcgtaagaattggaaaaaatttagtatgttaaagagtttttattgaggtggtaatttgtttgcgagaatttaagataaaatttaaataattaattaggggcgttgtgaggtaaatcgttgttattatattggtttttcgggaagtaagtttaagtcgcggagagggaagggaggtcgtgcgttcggggcggggcgcgtttttaagtcgagcgtagcggtcggggtaggttgtatcgagcgtggttttggggatatcgtgcggtttcgattggaggtggttgtgatgaagcgcggttatcgtataatggaaacgtgggtattttcgtttttatgaaagtttgttggtagagtttcgaggtcggtcggtgcgtttggacgggagttcgggttaaagcggtttggtgtgcggcgcgtttcgtttttcgtaggtttcgttttgttaggtcgcgttgttttttttttatttagtttttaaaattcggaggagcgggatggcgcgttttgattttggagtgggagtgggagcgagcgtttttgcgattttagttgtgagagtcgtaagggtatgggaattgacgttatttatcgatttttagttttaattttaacgttgtgaggaaatttcgattttgttaggtttttaagggtagcggggttcggcgagcgaggtattttttttcgtttttattttaatttaagcgtttttggtattgacgacgttaagagattcgagtgggagttaaagtttttagtgagggtagtaggtgtttaggtcgggttgcgggtttttgttgacgttttgttttaggtaaaggttttagttttttttcggagtcggttgtttcgcgttattggaaatcgtattttttcgtaggttagtttgtttgtcgaggcgttgttcggcgatttttttagatggattattataggtagcgggtggcgtggtaggtattttaaaggaaattaagcgttatcgtttcgatgttcgtagcgttgtttttagattgtaggaatcgttacgcgttttgcggggaggggaagggtttggcgttgggttatagcgaggtggaaatacgtttttttttttttttaagggagagtgggttggggatgggaaggggcgttttcggttatttttttagagagttagtttcgatttttttatttaacggtatttagtttttagaggttggggtaggggcgtggggcgttcgtttttgtttttgtatttttgagtgttacgtttttttttttttgtttttagtatgggtattagttttagttcgaacgatttttggtcgttaaattcgttgtttatttagtagattacgtttttgttatttttgtcggtgttggttattgtgtatgtgggttagcggttgttgaggtaacggaggcggtagtttcggttcgcgttttcgggttcgtttgcgtggttattgatcggaaacgcggcggcggtgggttaggcggtttatttttcgttcgttcgtttggcgcggcgttacggcgacgttttttagattcgtttgggtagttgttttatagtggtgttgaatggcgagcgcgttatttattaggttttggtgtagtagggttcggttttcgtcgatcggtcggttttcgttttttttcgtgtggtgttcggcggtcgtagtatggttttcggttattattcggagtattggaaggtgtagcggcgcgtagtttatagtatgatgcgtaatttttttacgcgttagtcgcgtagtcgttaagttttcgagggttacgtgttgagcgaggcgcgcgagttggtggcgttgttggtgcgcggtagcgcggacggcgtttttttcgattcgaggtcgttgatcgtcgtggtcgtggttaacgttatgagtgtcgtgtgtttcggttgtcgttatagttacgacgatttcgagtttcgtgagttgtttagttataacgaagagttcgggcgtacggtgggcgcgggtagtttggtggacgtgatgttttggttgtagtatttttttaattcggtgcgtatcgtttttcgcgaattcgagtagtttaa

SEQ ID NO: 38 - DNA, 216 bp, Artificial Sequence
  chemically treated genomic DNA (Homo sapiens)
tacgttttttaaatttagtcgcgcgttattatcgtgcgagttttcggtcgttttttttttcgtagagaggataaaggcgtttattatgtcgcggggggcggtttcgggtcgaaggttttcgtagtgttttaagaatttgtttaggatgaagttgttgaagttgcggttgagttgttcgaattcgcggaaaacggtgcgtatcgggttggggaagta

SEQ ID NO: 39 - DNA, 216 bp, Artificial Sequence
  chemically treated genomic DNA (Homo sapiens)
tatttttttaattcggtgcgtatcgtttttcgcgaattcgagtagtttaatcgtaattttagtaattttattttggataagtttttgaggtattgcgaaagttttcggttcggggtcgtttttcgcgatatgatggacgtttttattttttttgcggaaaagaaggcggtcggggattcgtacggtggtggcgcgcggttggatttggagaacgta

SEQ ID NO: 40 - DNA, 9100 bp, Artificial Sequence
  chemically treated genomic DNA (Homo sapiens)
atttataattttagaagtttttttaagaggaaaaaaaaggtgttacgtgttcgttgtttaatagatttaaatattttattatttttattatcgttattattatttttattgaatatttttattataagataggtagatatgtgatatgcggtgaaggttttattttatttattattaatttttataagtatttttattttagggtgtttcggggagggtagaggaggaatatttgggtttaaaagtcgtttttggattatttttagattagtttggtggaaacggtagtgtgagcgttatgttatttgagattgcgtttgaaaattttttttacgtttttaaattaaagttattttgaggtttaagaatgataattataggtgaatgttttattttttttacgagttaggttttttttttgtatgacgtagatcggcggttgagattcgttttgaggtttcgttttttattcggtttatgtggtttcgcgtagtttacgtagtttttttcgtttttaggtaattagttcgtgggaaatttattttagaaaagcgtgcgttatattattattttgcgatttaataaatttttttaattgttgtttaggaattagattttagatagattttgttgtgttcggtttttttagaaattttttttttagaggaagaagattcgggttgggaagagtgcgtgattatggtttcgggtttattgaaagatttttttttataaaagtttagggttgatattaaacgaagttatggagttatgtttatataaatattttttttttattcgaattgtggggtttggattgtgaaggttttcgttgtaagagcgggtattggcgaattttagtgtacgtcgcggtcgagaacggatgtagggcgggggatggttgagtcgtttgatttttgtagagaatttgtaggggttttcggagggtattttttgcgtttaagggagcgttttttttttttagtattcgggggaattgagggcgacgtgttagtttcgtatttaattttttttttttttgtaggtatagagttggtcggcgggggtagaggaggagttgggtttttattgcgttcgtttaaatttggttaggggttgcgttttttttttttattttacgacgatttttttttagttttcgttttttaatttaatcgttaattattcggaacgcgcgggcggggagcggcgaggagggcgagttcggggttcgtcgtcgtcgtcgtcgtcgcgcgcgcgcgtttaggaagcggtgtggttgttattttttttcgggttttttttttttttttttttgttttgttttttttttttttttttttttttttcgtttcgtcgttcgcgtttagtgtatttattttttttttacgttattcgttagcgcgttatgtaaattatcgtcgtcgtcggtttttattggtcgcggcgcgtttatttaatggtagttcgggttcggcgtatggttgttgggtttcgcgcgtcgtcggtttcgcgtgcgttttcgtttcgagcgtacggtttcgggtaggtagcgggtagtttatttcgggttcggcggtttcggtttttcggtttttttcgcgagttcgcgtttttttcgttgttttcgggtttttttttggttgtatcgtaatcgttttttgtaggtttttttgcgttttttttttttcgttattggcgtttggtttttttcgggtatttgggattagtatatgtttagcgtacgcggcgcgtcgttttgttagaagttgtagttttcgagttggaggtcgttgaggatcgagcgtaggaggaaggagatagcgcgtagcggcggtcggcgaggagatagtatatttcgggtcgggtttagcgtatcgttttcggttttaaaagcggagttgtaatttggttacgattgtatttgtttgtatcgtttcgtcgagggcgtttgggttgcggtggcggcgaagacggcgatttcgatcgtcggtttttttggtaagtggtttgtgtattaggagaaattttttatttgcgagtcgaatcggcgtcgagtgcgtgtgtttttgtttttttttgttgtcgttgtttttatttttttttattttttttttcgttaggattttttcgttttcgttttatttcgtttgaattttttttcgttttttttttatttcggtcgtttatgttttaggtttttttttcgcggtgtcggtgaattcgttagtcgtttcgatgtatagtatgatgatggagatcgatttgtattcgttcggcggcgtttaggtttttacgaatttttcgggtttcgtcggggcgggcggcggcgggggcggaggcgggggcggcggcggcggcgggggcgttaaggttaattaggatcgggttaaacggtttatgaacgtttttatggtgtggtttcgcgggtagcggcgtaagatggtttaggagaattttaagatgtataattcggagattagtaagcgtttgggggtcgagtggaaggttatgttcgaggtcgagaagcggtcgtttatcgacgaggttaagcggttgcgcgcgttgtatatgaaggagtattcggattataagtatcggtcgcgtcgtaagattaagacgttgtttaagaaggataagtattcgttggtcggcgggtttttggcggtcggcgcgggtggcggcggcgcggttgtggttatgggcgtgggcgtgggcgtgggcgcggcggtcgtgggttagcgtttggagagtttaggcggcgcggcgggcggcggttacgcgtacgttaacggttgggttaacggcgtttatttcggttcggtggcggcggcggcggcggtcgcggttatgatgtaggaggcgtagttggtttacgggtagtattcgggcgcgggcggcgcgtattcgtacgcgtatttcgcgtattcgtattcgtattattcgtacgcgtattcgtataattcgtagtttatgtatcgttacgatatgggcgcgttgtagtatagttttatttttaattcgtagggttatatgagcgcgtcgttttcgggttacggcggttttttttacggcgtcgcggtcgtcgtcgtcgtcgttgcgggcggcgcgtattagaattcggtcgtggcggcggcggcggcggcggcggtcgcgtcgtcgggcgttttgggcgcgttgggttttttggtgaagtcggagtttagcggtagttcgttcgttttagcgtattcgcgggcgtcgtgtttcggggatttgcgcgagatgattagtatgtatttgttcgtcggcgaggggggcgattcggcggcggtagtagcggtcgcggcgtagagtcggttgtattcgttgtcgtagtattattagggcgcgggcgcgggcgtgaacggtacggtgtttttgacgtatatttagcgttttcgggacgtcggggattttgcggcggcgatttacgagttcgcggttcgcgttcggttttcgtttcgtttcggcgcggcgtggtttttgtatagacgtttttatatttttgttaaaaggaaaatattggagacgaacgtcgggtgacgcgtgttttttatttatttttttcggagattttggcgatcgtcgggcgttgatattagatttgggttttagattgaatttcggtgtttttttgagattttttgtatagtatttattatttacggaggaagcggaaagcgttttttttgttcgaggggataaaaaagttaaaacgaggcgagaggcgaagtttatttttgtatatcggtcggcgcgtttattttttttcgcgttgttttcggacggcgtcgatcgtcggagtttaagtgacgcggagttcgtcgtatttgttataaatgtagtaaggtaggtttaagtatttataagttttttgtagttgttatcgtttttttgggttggtttgttaatttatataaagagattattattattatttttttttttagacggcggagttatattttgggttttgtaaaattttatgtatttgagtatttttatttttttttttgggttttgtattattttttgtaaatgtattgtgaaaaattttattttcggcgttgtaatgcggggaggagaagttagattatgtatatagttttttaaaaagttttttttttaaaaacgaaaaaagattttttatttaaaatgtttcgagttaataaatttaagagatagagtttattttttttataaatttgtaatatgttatttttatgtgtatgttttatgagtttaaaatgtaatgaggaaatttgatagggaaattatttgtatgaattaaaagtaagggaatttcggggaatgggaggataggattttttaaggaattttttttaatgaaagagaaggaagttaaaatttataggttattttgtagagttgagtgttaatacgggtcgagaaataaaagtattttttgtttcggttgttttattgcggacggttggggttgttgcgcgttattttgttgtaagcggggcgttttttatttggttgggggtttgcgttatagtttggtttagaggagggaggaggaagggaagattttagtggtgggattttggattaggttatggatgaaggataaagattagggtaggttacgggttttttaattttttagtaattaagatttcgagtagaatttatttaaatgtgttttaaggaaatataatcgttgaattaaaacgtattgtagtcgagtttttttcgtttattttttgtttttttttttggttttttttttttgggaaaacgggtaaaataattgtgttggatttttatatatatagaaatatcgattattattttttttcgcgtgaattgggatgtaagttgttaatcgatgtgaacgtaaaatgttttgtttattatttttgacgagattttgaggttgtttgatgttttaaattttttaattatattattttttaggtgtttattggtatattgtagttttttttttgaaatttaaaaatttttgtaaaattttgtttttaagtaatttgatagtattaaatattgtatttaaaaattatattgtagtaaatatatttaaaaattaattataacgttaagatgaaattatatttttggaaaaaaaaaatatttgaagtttagatggaaatacgtttattttagtagttttaggttttttttcgtttttttaatatttttttttgttttggagtatggattgttcgtttaaaagtgagtttatgttataagtttaatgagaatcgaatttagtttgtattcgagaatagttttaagtataatgttgatttgataattgacgtgtaatttgggaagttattttgataattttgtttaaattatttattcgttaaagtgattataaaaaagtttaagaatgatgtttattgttttttaataagataataaatttttttttttttttttttttttttatttttattttttttagttatttgattttttttgaagtagttgtttttggaagagtttgtgcgtttatggatggttgagtattattacgatttagttcgggataagggtttttttagtttttttcgggagatgatttgggaaattttataatgtttgttttgttaatttatcgggattttgagggtttaatgggattttgagggttttttttgaaatatataaatttaaaggattttttttgaggttttttgattgacgtttatttttagtttggtttttgtgtttttttgtgtgtattttggagtttttgtgtttaattgttggtatttaggttttggtttaagattaggatgtgggttttattttagaggtatagattatgaaaagttgagttagtgcgttcgggacgttaggtaagtagtttttatagtttggtattttattgtaggtgtttcgtgtatagttagttgaaatagttaatgttaggtgttttaattattttatttttttgttttgttgattagaataatatagaaaaaagtaaatataaatttttaatgattttatttaaaaatattatagggtgggggtaaggaaattagttgagatttattttaggattgagattttattttttttttttcgtttttagtagtgtcgttttaatttaaattagtggagaaaagattatagtaggttttgagtcgattgtgaattcggtgtttggttaaggtaatatttatcgtatttacggagtgaaatattatatgatgatagttattatattatatgacgattttatttattttttaaattatagggtggtgtttttgtcgtttagtttaattatgtttgtaattcgtgtagggaaggcggataggagtttttgaggtttagtgtaaagtttgtattagtttttgcgggggcgatagtgtgatttcgtaaatttgttattgcgttcgggttttgttttttaaattgagggtaggagggtttatttgagggtttttttgttttgttttgttttgtttttgttttgttttgttttttaatttattcgttttttttgttgttgagattttgacgttttttttttcggagaaatttattcgtaacgtattagatggattagttttaaagaagattcgggtatagcgtgatttttagatgcgcgtcgggagcgtgattgataggtttattaaaattacgcgtgtgggagaacggtatttatgttttcgcgttttattttttcggtaaagattgggcgtcgtagatttttgttttcggaaaattttagttaatttaagaaatttattttcggacgtgtgttcgttttttttcgaaggttcgttttaggttagttcggattttagcgttttttcgatttcgtcgggtttcggtcgattttcgttttttttttatttacgttcggtttgggttcgggggtagcggttttagaggcgtcggcggtagaatttaattttcggtttgagtttttggaaattttaagtgaaaagtagatttggttttggcgcggttttttttttagcgtgattatttggcgagattgaaaggttaggttagatggggaaaagtgagcggggtgcgggtttttagtattcggcggggtggggcggcgttaggacggagcgagggtcggcgggggggttcgcgtggaggtttaggtcgggaggtggggacgtagggattttttatttagttttttgttttcgttcgagttaggtttcgggattatttttttttgtttgagggcgagtttttttttttttttttttttttcgtttttttcgtttttttttttttttttttttttttttttttcggttttttttttttagttgcgcgttcgtcgggattacgtttttttcgttttcgggagtcgagcggcgtttgcggttggttcggacgtgtttttttcgggcgggggtggtcgggttttttcggggtttcgggtttttcgggcgtatttttttgtttgcgtttttttaagtcgtttttttttcggttttgttcgcggttgagtttcgtatatcgcgtcgttgtttttggggtttcggtatacggcgtttttttttcgttttcgttatttatttttatcgtttttttagtttttgtgtcgtttttatcgttttttgattttcgtatcgagttgcgttttcgtcgtcggttttttttagcgcggttcggttttttttttgtttttgaagttttttcgtcgaggttcgcgcgcggttttttttttcgttttttttcggtttttgggcgtttagtcggaggtcggggcgggatggggtacgagtttcggggcggttcgcgttttttttattagtttttttattgtttcggtttcgttttcgtagtttcggggcgggagggcgtaggggttttcgggcgttttgggagtttattttttttaggttcgcgtcggtgttagtcgtcggcggggggcgggtggagattaagatgagtgttgcgagggacggggtcgagggttttgtgtagaaggagagtaggattagtggagagaaagtgttgattcggggttagtcgtaagttaaatttttttatatttagtcggcggaacgagtacggttcgggtcggacggtaataagtgggcgcgaagggagggggaggggaggtcgggtatcggtcgggttcggcgtgagagaggggagggggaggggacgcggttatagcgttttagggttttagcgttatcggggacgggcgtcgaggggagcgcgtattagcgattcgggcgcggattggggtttgtagggcgtgattggttgttttttaggattttattttttttataaatatttgttttttttatttttcggggtcgtttcggttgtttttttggagggaagattggggagaaggttgtttgcgttttttgttttagaggttttgttttagaaattgttttttaatttttataagaaataaaaaaattataggaaggtttggtttttttttcggacgattgcgtttttaggttttttaggaattttcgttttattcgagttttttcgtagttttggatttatttttggggggcgtgtgtgacgtagaatcggggtataaaatattaatgttgtttgttacgatatcgttttttttattcgggtagagttgcggttttcgggcgttgcgcgtggcgttttttattacggagggaaagtcgcggtttcgcgggaaaggagtgaaaatcgagtgtgggtgaagaggagagggaggttagggggtaagggaagaaagtagataaatgtattttttttagtagttaagttggaaatttgtgttgaaagtataatagtaagagtttttatatgaaaaatacgtgaagaattcgagtaagtgatagatttaaagacggaaaatgatcgtttattttgatagtaaaaataaaaagaatagaattgatatattttcgtttaaattattttttatttgtcgatatgaaatattaatatttaaataaaaataaaggataaagtagtttttaaaaataatataaaataagtaattttgagtgaatgatttgtttatagtttattttgggtgatatgggggcgttgtgatggaaaatgggttttgggtttaaaatta

SEQ ID NO: 41 - DNA, 9100 bp, Artificial Sequence
  chemically treated genomic DNA (Homo sapiens)
tgattttgaatttagaatttattttttattatagcgtttttatgttatttagggtaagttgtggataggttatttatttagagttgtttgttttgtgttgtttttaaaaattgttttgttttttgtttttgtttgagtgttggtgttttatatcggtagatgaaaagtaatttagacgaaaatatgttaattttgttttttttatttttattattaaaatagacgattatttttcgtttttggatttattatttgttcgggttttttacgtgttttttatgtgaaaatttttgttgttgtatttttagtataaatttttagtttggttgttagggaagatgtatttatttgttttttttttttgttttttgattttttttttttttttatttatattcggtttttatttttttttcgcggagtcgcggtttttttttcgtgatgaaaaacgttacgcgtaacgttcgggagtcgtagttttgttcgggtggagaaagcggtgtcgtgataaatagtattgatattttatatttcgattttgcgttatatacgttttttagaaatagatttagggttgcgaagaagttcggataaggcgaagatttttggagagtttggggacgtagtcgttcgggagaggaattaggtttttttgtgatttttttgttttttatggaaattaagaaatagtttttaaaatagagtttttggggtagagagcgtaggtaattttttttttagttttttttttagaggagtagtcgaagcggtttcggggaatggaaaaggtaggtgtttatgaaggagatggagttttggggggtagttagttacgttttgtaggttttagttcgcgttcgggtcgttggtgcgcgtttttttcggcgttcgttttcgatgacgttgaggttttggggcgttgtggtcgcgttttttttttttttttttttttacgtcggattcggtcggtattcggtttttttttttttttttttcgcgtttatttgttgtcgttcggttcgagtcgtgttcgtttcgtcggttgagtgtaaaagggtttgatttgcggttgatttcgggttagtattttttttttattaattttgttttttttttatataaaattttcggtttcgtttttcgtagtatttattttaatttttattcgtttttcgtcggcggttgatatcggcgcggatttgagggagatgggtttttagggcgttcggggatttttgcgttttttcgtttcgaggttgcggggacggggtcgaggtaatgaggggattagtagggggagcgcgggtcgtttcgagattcgtgttttatttcgtttcgattttcgattgggcgtttaagggtcggagagggacggagaggggagtcgcgcgcgggtttcggcgggggagttttaaagataaagaggaggtcgggtcgcgttgagagaggtcggcggcggagacgtagttcggtgcgggagttagagggcggtggagacggtatagggattggagaggcggtgggagtggatggcgggggcggggagggaacgtcgtgtgtcgggattttaaggatagcggcgcggtgtgcggggtttagtcgcgggtagagtcggagaaagggcgatttggagaggcgtaggtaggggggtgcgttcgggaggttcgaggtttcgaggaggttcggttattttcgttcggaggggatacgttcggattagtcgtagacgtcgttcggttttcgggggcgggaggagcgtggtttcggcgggcgcgtagttggagaggaagggtcggggagggaggagggagagagggagggaagaacgggggaggcggggaggaagagggaggaggagagttcgtttttaggtaaggggaggtgatttcgaggtttggttcgggcgggagtagaggattgggtgaggggtttttgcgtttttatttttcggtttgggtttttacgcgagttttttcgtcggttttcgtttcgttttgacgtcgttttatttcgtcggatattgggggttcgtatttcgtttatttttttttatttggtttggttttttagtttcgttagatagttacgttggaaagagagtcgcgttaaggttaagtttgttttttatttgaagtttttaaggatttagatcgggggttaaattttgtcgtcgacgtttttggagtcgttgttttcgggtttaggtcgagcgtgggtggggagggggcgggagtcggtcggagttcgacggggtcgagggggcgttggagttcgggttggtttgaagcgagttttcgggggggggcgggtatacgttcggggatgggttttttgaattaattggaatttttcggagatagaaatttgcggcgtttagtttttgtcgggggaatgaaacgcgggagtatgagtgtcgtttttttatacgcgtgattttaatagatttattagttacgttttcgacgcgtatttggagattacgttgtgttcgagttttttttaaaattaatttatttagtacgttacgggtgggttttttcggggaaggggacgttaaaattttaataataaaaggggcgggtgagttgaaaaataaaataaggtaaaaatagaataaaataaagtaaaaaaatttttaagtaaatttttttatttttagtttggagggtagggttcgagcgtaatggtagatttacgaagttatattgtcgttttcgtagaaattgatgtaaattttgtattaggttttaaagatttttattcgttttttttatacgggttgtaaatataattggattaagcgatagaagtattattttgtgatttgggaagtgaatgaagtcgttatataatataataattattattatatagtattttatttcgtgaatacgatgagtgttattttggttaagtatcgaatttatagtcggtttagggtttattgtaattttttttttattaatttgaattggagcgatattgttgggggcggggaaggggggatagaattttaattttgagatgaattttagttaatttttttgtttttattttgtgatatttttaaatggagttattaaaaatttatatttgtttttttttgtgttgttttaattaataaaataaggaaataaggtggttggagtatttggtattggttattttagttgattgtgtacgaagtatttgtaataagatgttaaattgtaaaagttgtttgtttggcgtttcgggcgtattaatttagttttttatagtttgtgtttttaaagtggggtttatattttaattttgagttaagatttagatgttaataattggatatagaaattttagggtatatataggggagtataggggttagattgagagtggacgttagttaaagaattttagagagagttttttaagtttgtatattttagagaaaatttttaaggttttattggatttttaaggtttcggtgagttaatagaataagtattataaaattttttaaattatttttcggagaggattggggaggtttttatttcggattaagtcgtagtggtgtttagttatttatgggcgtatagatttttttagaaataattgttttagaaaggattaaatagttaaaagaaataaaaataaagaaaaagaaaagagggggggggtttattattttgttagaaagtagtggatattatttttgaatttttttgtaattattttaacgaatgagtggtttaagtaaaattattaaaatgattttttaaattatacgttaattgttagattagtattatatttaaagttattttcgaatgtaggttgaattcggtttttattaaatttatagtataggtttatttttggacggatagtttatattttaggataaggaagggtgttgagaaagcgaggggaaatttaaggttgttgaaataaacgtatttttatttgggttttaagtgttttttttttttaaaaatataattttattttaacgttgtgattaatttttaaatgtatttgttatagtataatttttaaatgtaatatttaatgttgttagattatttgaagataaagttttatagaaatttttaaattttaaaaaaaaaattgtaatgtattaataaatatttagaaaataatataattaaaaaatttaaagtattaaataattttaagatttcgttaggaataatgaataaggtattttgcgtttatatcggttagtaatttgtattttagtttacgcgggggagggtgatggtcgatatttttgtgtgtgtgagaatttagtataattattttgttcgtttttttaagagaaagaagttagggggaggggtagaggatggacggagggggttcggttgtagtacgttttggtttagcgattgtgtttttttgaaatatatttagataaattttgttcgaaattttaattgttggggaattgggaaattcgtgatttgttttggtttttgttttttatttatggtttggtttagggttttattattggggttttttttttttttttttttttttggattaaattgtggcgtagatttttagttaggtggaaggcgtttcgtttgtagtaaggtaacgcgtagtagttttagtcgttcgtagtgaaatagtcggagtagaagatatttttatttttcggttcgtattaatatttagttttataaaataatttataggttttaattttttttttttttattgaaaaaggttttttgaaaaattttgtttttttatttttcggggtttttttatttttagtttatatagataatttttttgttagatttttttattgtattttgaatttataaaatatgtatataaaaatagtatgttataaatttatggagaaaatgggttttgttttttaaatttgttgattcgaaatattttgggtggggggttttttttcgtttttagaagaaaggttttttagaaaattatgtatataatttgatttttttttttcgtattgtaacgtcgaaaataaaattttttataatgtatttataagaaataatataaaatttaaaaaaaaaaatggaaatgtttagatatataaagttttataaaatttagaatataatttcgtcgtttgaaggagggggtggtggtggtaatttttttgtataaattaataaattaatttaaaagagcggtaataattataaaaaatttgtaagtgtttggatttgttttattatatttataataaatgcgacgagtttcgcgttatttgggtttcggcggtcggcgtcgttcggaagtaacgcggaggaaagtgagcgcgtcggtcggtatataaaagtgggtttcgtttttcgtttcgttttgatttttttgttttttcgagtaaagaaaacgtttttcgtttttttcgtaggtgataaatattgtataaaaagttttaagaaaatatcgaagtttagtttaaaatttaagtttggtgttagcgttcggcggtcgttagggttttcggggaaggtgagtgggggatacgcgttattcggcgttcgtttttagtattttttttttgataagaatgtgggaacgtttgtataaaagttacgtcgcgtcggggcggggcgggagtcgggcgcgggtcgcgagttcgtgggtcgtcgtcgtagagttttcggcgtttcgaaggcgttagatgtgcgttaggggtatcgtgtcgtttacgttcgcgttcgcgttttggtagtgttgcggtagcgagtgtagtcggttttgcgtcgcggtcgttgttgtcgtcgtcgggtcgtttttttcgtcggcgggtaagtatatgttgattatttcgcgtaggttttcggggtacggcgttcgcgagtgcgttggggcgggcgggttgtcgttgggtttcgattttattagagagtttagcgcgtttagggcgttcgacgacgcggtcgtcgtcgtcgtcgtcgtcgttacggtcgagttttggtgcgcgtcgttcgtagcggcggcggcggcggtcgcggcgtcgtaggggaggtcgtcgtagttcgagggcgacgcgtttatgtagttttgcgagttggagatggggttgtattgtagcgcgtttatgtcgtagcggtgtatgggttgcgggttgtgcgggtgcgcgtgcgggtggtgcgggtgcgggtgcgcggggtgcgcgtgcgggtgcgcgtcgttcgcgttcgggtgttgttcgtaggttagttgcgttttttgtattatggtcgcggtcgtcgtcgtcgtcgttatcgagtcggggtaggcgtcgttggtttagtcgttgacgtgcgcgtagtcgtcgttcgtcgcgtcgtttgggttttttaggcgttggtttacggtcgtcgcgtttacgtttacgtttacgtttatggttatagtcgcgtcgtcgttattcgcgtcggtcgttaggagttcgtcggttagcgagtatttgttttttttgagtagcgttttggttttgcggcgcggtcggtatttgtaattcgggtgtttttttatgtgtagcgcgcgtagtcgtttggtttcgtcgatgaacggtcgtttttcggtttcggatatgattttttattcggtttttaggcgtttgttgattttcgagttgtgtattttggggtttttttgggttattttgcgtcgttgttcgcgggattatattatgaaggcgtttatgggtcgtttgattcggttttggttggttttggcgttttcgtcgtcgtcgtcgttttcgttttcgttttcgtcgtcgttcgtttcggcggggttcgagaggttcgtgggggtttgggcgtcgtcgggcgagtgtaggtcggtttttattattatgttgtatatcggggcggttggcgggtttatcggtatcgcgaggagagggtttggagtatagacggtcggggtgggagggagacggagaggaatttagacggagtgagacgggggcgggggggttttagcggagagaagaatggggaggggtggaggtaacgataataaaaaaaggtagaaatatacgtattcggcgtcggttcggttcgtaggtggaaagttttttttgatgtataaattatttgttaaagaggtcgacggtcggggtcgtcgttttcgtcgttatcgtagtttaggcgttttcggcggagcggtgtaaataggtgtagtcgtggttaagttgtagtttcgtttttggggtcgggagcggtgcgttgggttcggttcggggtgtgttgttttttcgtcggtcgtcgttgcgcgttgtttttttttttttgcgttcggtttttagcggtttttaattcggaggttgtaatttttagtagggcggcgcgtcgcgtgcgttgggtatgtgttggttttaggtgttcgggggaagttaggcgttagtggcggggggggggaggcgtaggggggtttgtagggggcgattacggtgtagttagggaggggttcggggatagcgggaggagcgcgggttcgcggagagggtcggagagtcggggtcgtcgagttcgggatgggttgttcgttgtttgttcggggtcgtgcgttcggagcggaggcgtacgcggggtcggcggcgcgcggggtttagtagttatacgtcgggttcgggttgttattaaatgagcgcgtcgcggttaatgggagtcggcggcggcggtgatttgtatggcgcgttggcgagtgacgtggggagggagtagatatattgggcgcgggcggcggagcggggaggaggggaggaaggagggggagtaaagtaggaaggaggggggaggaggttcgggagggggtgatagttatatcgttttttgagcgcgcgcgcgcggcggcggcggcggcggcgaatttcgagttcgtttttttcgtcgtttttcgttcgcgcgtttcgaatgattaacgattgggttgaaaagcgaagattaagaaaggatcgtcgtggggtggggggaggaaacgtagtttttggttaggtttaaacgggcgtagtggagatttagttttttttttgttttcgtcggttaattttgtgtttgtagggaaggggaaagttgagtgcggggttggtacgtcgtttttagttttttcgagtgttgaaaaggaggggcgtttttttggacgtaggggatatttttcgagggtttttgtaggttttttgtaaggattaggcggtttagttatttttcgttttgtattcgttttcggtcgcggcgtgtattgaagttcgttagtgttcgtttttgtagcgaaggtttttatagtttaggttttataattcgggtaaagggggagtatttgtgtgggtatggttttatagtttcgtttagtattagttttaaatttttgtggggaggagttttttaatgagttcggggttatagttacgtattttttttaattcggattttttttttttggaaaaggaatttttaggaaggtcgaatataataagatttatttggaatttagtttttgaataatagttgaaaaagtttgttgaatcgtaaaataatgatatggcgtacgtttttttggagtgaattttttacgagttggttgtttaagaacggagaaaattgcgtgaattgcgcggggttatataaatcgaatgaaaggcggggttttaggacgggttttagtcgtcggtttgcgttatgtaaaggaaaggtttggttcgtggaaagagtaaggtatttatttgtggttattatttttaaattttaaagtggttttgatttgggaacgtgaaagagatttttaaacgtagttttaagtagtatagcgtttatattatcgtttttattagattgatttgaaagtggtttaaagacgatttttgagtttaagtattttttttttgtttttttcgaggtattttgagatgagagtgtttgtggagattggtggtgggtaaagtagaatttttatcgtatgttatatgtttgtttgttttgtagtaggaatatttagtaaagatgatgataacggtaataggagtaataggatgtttgagtttgttgggtagcgaatacgtgatattttttttttttttttaaaaaaatttttgaggttgtgaat

SEQ ID NO: 42 - DNA, 8500 bp, Artificial Sequence
  chemically treated genomic DNA (Homo sapiens)
gttatttgagattgcgtttgaaaattttttttacgtttttaaattaaagttattttgaggtttaagaatgataattataggtgaatgttttattttttttacgagttaggttttttttttgtatgacgtagatcggcggttgagattcgttttgaggtttcgttttttattcggtttatgtggtttcgcgtagtttacgtagtttttttcgtttttaggtaattagttcgtgggaaatttattttagaaaagcgtgcgttatattattattttgcgatttaataaatttttttaattgttgtttaggaattagattttagatagattttgttgtgttcggtttttttagaaattttttttttagaggaagaagattcgggttgggaagagtgcgtgattatggtttcgggtttattgaaagatttttttttataaaagtttagggttgatattaaacgaagttatggagttatgtttatataaatattttttttttattcgaattgtggggtttggattgtgaaggttttcgttgtaagagcgggtattggcgaattttagtgtacgtcgcggtcgagaacggatgtagggcgggggatggttgagtcgtttgatttttgtagagaatttgtaggggttttcggagggtattttttgcgtttaagggagcgttttttttttttagtattcgggggaattgagggcgacgtgttagtttcgtatttaattttttttttttttgtaggtatagagttggtcggcgggggtagaggaggagttgggtttttattgcgttcgtttaaatttggttaggggttgcgttttttttttttattttacgacgatttttttttagttttcgttttttaatttaatcgttaattattcggaacgcgcgggcggggagcggcgaggagggcgagttcggggttcgtcgtcgtcgtcgtcgtcgcgcgcgcgcgtttaggaagcggtgtggttgttattttttttcgggttttttttttttttttttttgttttgttttttttttttttttttttttttttcgtttcgtcgttcgcgtttagtgtatttattttttttttacgttattcgttagcgcgttatgtaaattatcgtcgtcgtcggtttttattggtcgcggcgcgtttatttaatggtagttcgggttcggcgtatggttgttgggtttcgcgcgtcgtcggtttcgcgtgcgttttcgtttcgagcgtacggtttcgggtaggtagcgggtagtttatttcgggttcggcggtttcggtttttcggtttttttcgcgagttcgcgtttttttcgttgttttcgggtttttttttggttgtatcgtaatcgttttttgtaggtttttttgcgttttttttttttcgttattggcgtttggtttttttcgggtatttgggattagtatatgtttagcgtacgcggcgcgtcgttttgttagaagttgtagttttcgagttggaggtcgttgaggatcgagcgtaggaggaaggagatagcgcgtagcggcggtcggcgaggagatagtatatttcgggtcgggtttagcgtatcgttttcggttttaaaagcggagttgtaatttggttacgattgtatttgtttgtatcgtttcgtcgagggcgtttgggttgcggtggcggcgaagacggcgatttcgatcgtcggtttttttggtaagtggtttgtgtattaggagaaattttttatttgcgagtcgaatcggcgtcgagtgcgtgtgtttttgtttttttttgttgtcgttgtttttatttttttttattttttttttcgttaggattttttcgttttcgttttatttcgtttgaattttttttcgttttttttttatttcggtcgtttatgttttaggtttttttttcgcggtgtcggtgaattcgttagtcgtttcgatgtatagtatgatgatggagatcgatttgtattcgttcggcggcgtttaggtttttacgaatttttcgggtttcgtcggggcgggcggcggcgggggcggaggcgggggcggcggcggcggcgggggcgttaaggttaattaggatcgggttaaacggtttatgaacgtttttatggtgtggtttcgcgggtagcggcgtaagatggtttaggagaattttaagatgtataattcggagattagtaagcgtttgggggtcgagtggaaggttatgttcgaggtcgagaagcggtcgtttatcgacgaggttaagcggttgcgcgcgttgtatatgaaggagtattcggattataagtatcggtcgcgtcgtaagattaagacgttgtttaagaaggataagtattcgttggtcggcgggtttttggcggtcggcgcgggtggcggcggcgcggttgtggttatgggcgtgggcgtgggcgtgggcgcggcggtcgtgggttagcgtttggagagtttaggcggcgcggcgggcggcggttacgcgtacgttaacggttgggttaacggcgtttatttcggttcggtggcggcggcggcggcggtcgcggttatgatgtaggaggcgtagttggtttacgggtagtattcgggcgcgggcggcgcgtattcgtacgcgtatttcgcgtattcgtattcgtattattcgtacgcgtattcgtataattcgtagtttatgtatcgttacgatatgggcgcgttgtagtatagttttatttttaattcgtagggttatatgagcgcgtcgttttcgggttacggcggttttttttacggcgtcgcggtcgtcgtcgtcgtcgttgcgggcggcgcgtattagaattcggtcgtggcggcggcggcggcggcggcggtcgcgtcgtcgggcgttttgggcgcgttgggttttttggtgaagtcggagtttagcggtagttcgttcgttttagcgtattcgcgggcgtcgtgtttcggggatttgcgcgagatgattagtatgtatttgttcgtcggcgaggggggcgattcggcggcggtagtagcggtcgcggcgtagagtcggttgtattcgttgtcgtagtattattagggcgcgggcgcgggcgtgaacggtacggtgtttttgacgtatatttagcgttttcgggacgtcggggattttgcggcggcgatttacgagttcgcggttcgcgttcggttttcgtttcgtttcggcgcggcgtggtttttgtatagacgtttttatatttttgttaaaaggaaaatattggagacgaacgtcgggtgacgcgtgttttttatttatttttttcggagattttggcgatcgtcgggcgttgatattagatttgggttttagattgaatttcggtgtttttttgagattttttgtatagtatttattatttacggaggaagcggaaagcgttttttttgttcgaggggataaaaaagttaaaacgaggcgagaggcgaagtttatttttgtatatcggtcggcgcgtttattttttttcgcgttgttttcggacggcgtcgatcgtcggagtttaagtgacgcggagttcgtcgtatttgttataaatgtagtaaggtaggtttaagtatttataagttttttgtagttgttatcgtttttttgggttggtttgttaatttatataaagagattattattattatttttttttttagacggcggagttatattttgggttttgtaaaattttatgtatttgagtatttttatttttttttttgggttttgtattattttttgtaaatgtattgtgaaaaattttattttcggcgttgtaatgcggggaggagaagttagattatgtatatagttttttaaaaagttttttttttaaaaacgaaaaaagattttttatttaaaatgtttcgagttaataaatttaagagatagagtttattttttttataaatttgtaatatgttatttttatgtgtatgttttatgagtttaaaatgtaatgaggaaatttgatagggaaattatttgtatgaattaaaagtaagggaatttcggggaatgggaggataggattttttaaggaattttttttaatgaaagagaaggaagttaaaatttataggttattttgtagagttgagtgttaatacgggtcgagaaataaaagtattttttgtttcggttgttttattgcggacggttggggttgttgcgcgttattttgttgtaagcggggcgttttttatttggttgggggtttgcgttatagtttggtttagaggagggaggaggaagggaagattttagtggtgggattttggattaggttatggatgaaggataaagattagggtaggttacgggttttttaattttttagtaattaagatttcgagtagaatttatttaaatgtgttttaaggaaatataatcgttgaattaaaacgtattgtagtcgagtttttttcgtttattttttgtttttttttttggttttttttttttgggaaaacgggtaaaataattgtgttggatttttatatatatagaaatatcgattattattttttttcgcgtgaattgggatgtaagttgttaatcgatgtgaacgtaaaatgttttgtttattatttttgacgagattttgaggttgtttgatgttttaaattttttaattatattattttttaggtgtttattggtatattgtagttttttttttgaaatttaaaaatttttgtaaaattttgtttttaagtaatttgatagtattaaatattgtatttaaaaattatattgtagtaaatatatttaaaaattaattataacgttaagatgaaattatatttttggaaaaaaaaaatatttgaagtttagatggaaatacgtttattttagtagttttaggttttttttcgtttttttaatatttttttttgttttggagtatggattgttcgtttaaaagtgagtttatgttataagtttaatgagaatcgaatttagtttgtattcgagaatagttttaagtataatgttgatttgataattgacgtgtaatttgggaagttattttgataattttgtttaaattatttattcgttaaagtgattataaaaaagtttaagaatgatgtttattgttttttaataagataataaatttttttttttttttttttttttttatttttattttttttagttatttgattttttttgaagtagttgtttttggaagagtttgtgcgtttatggatggttgagtattattacgatttagttcgggataagggtttttttagtttttttcgggagatgatttgggaaattttataatgtttgttttgttaatttatcgggattttgagggtttaatgggattttgagggttttttttgaaatatataaatttaaaggattttttttgaggttttttgattgacgtttatttttagtttggtttttgtgtttttttgtgtgtattttggagtttttgtgtttaattgttggtatttaggttttggtttaagattaggatgtgggttttattttagaggtatagattatgaaaagttgagttagtgcgttcgggacgttaggtaagtagtttttatagtttggtattttattgtaggtgtttcgtgtatagttagttgaaatagttaatgttaggtgttttaattattttatttttttgttttgttgattagaataatatagaaaaaagtaaatataaatttttaatgattttatttaaaaatattatagggtgggggtaaggaaattagttgagatttattttaggattgagattttattttttttttttcgtttttagtagtgtcgttttaatttaaattagtggagaaaagattatagtaggttttgagtcgattgtgaattcggtgtttggttaaggtaatatttatcgtatttacggagtgaaatattatatgatgatagttattatattatatgacgattttatttattttttaaattatagggtggtgtttttgtcgtttagtttaattatgtttgtaattcgtgtagggaaggcggataggagtttttgaggtttagtgtaaagtttgtattagtttttgcgggggcgatagtgtgatttcgtaaatttgttattgcgttcgggttttgttttttaaattgagggtaggagggtttatttgagggtttttttgttttgttttgttttgtttttgttttgttttgttttttaatttattcgttttttttgttgttgagattttgacgttttttttttcggagaaatttattcgtaacgtattagatggattagttttaaagaagattcgggtatagcgtgatttttagatgcgcgtcgggagcgtgattgataggtttattaaaattacgcgtgtgggagaacggtatttatgttttcgcgttttattttttcggtaaagattgggcgtcgtagatttttgttttcggaaaattttagttaatttaagaaatttattttcggacgtgtgttcgttttttttcgaaggttcgttttaggttagttcggattttagcgttttttcgatttcgtcgggtttcggtcgattttcgttttttttttatttacgttcggtttgggttcgggggtagcggttttagaggcgtcggcggtagaatttaattttcggtttgagtttttggaaattttaagtgaaaagtagatttggttttggcgcggttttttttttagcgtgattatttggcgagattgaaaggttaggttagatggggaaaagtgagcggggtgcgggtttttagtattcggcggggtggggcggcgttaggacggagcgagggtcggcgggggggttcgcgtggaggtttaggtcgggaggtggggacgtagggattttttatttagttttttgttttcgttcgagttaggtttcgggattatttttttttgtttgagggcgagtttttttttttttttttttttttcgtttttttcgtttttttttttttttttttttttttttttttcggttttttttttttagttgcgcgttcgtcgggattacgtttttttcgttttcgggagtcgagcggcgtttgcggttggttcggacgtgtttttttcgggcgggggtggtcgggttttttcggggtttcgggtttttcgggcgtatttttttgtttgcgtttttttaagtcgtttttttttcggttttgttcgcggttgagtttcgtatatcgcgtcgttgtttttggggtttcggtatacggcgtttttttttcgttttcgttatttatttttatcgtttttttagtttttgtgtcgtttttatcgttttttgattttcgtatcgagttgcgttttcgtcgtcggttttttttagcgcggttcggttttttttttgtttttgaagttttttcgtcgaggttcgcgcgcggttttttttttcgttttttttcggtttttgggcgtttagtcggaggtcggggcgggatggggtacgagtttcggggcggttcgcgttttttttattagtttttttattgtttcggtttcgttttcgtagtttcggggcgggagggcgtaggggttttcgggcgttttgggagtttattttttttaggttcgcgtcggtgttagtcgtcggcggggggcgggtggagattaagatgagtgttgcgagggacggggtcgagggttttgtgtagaaggagagtaggattagtggagagaaagtgttgattcggggttagtcgtaagttaaatttttttatatttagtcggcggaacgagtacggttcgggtcggacggtaataagtgggcgcgaagggagggggaggggaggtcgggtatcggtcgggttcggcgtgagagaggggagggggaggggacgcggttatagcgttttagggttttagcgttatcggggacgggcgtcgaggggagcgcgtattagcgattcgggcgcggattggggtttgtagggcgtgattggttgttttttaggattttattttttttataaatatttgttttttttatttttcggggtcgtttcggttgtttttttggagggaagattggggagaaggttgtttgcgttttttgttttagaggttttgttttagaaattgttttttaatttttataagaaataaaaaaattataggaaggtttggtttttttttcggacgattgcgtttttaggttttttaggaattttcgttttattcgagttttttcgtagttttggatttatttttggggggcgtgtgtgacgtagaatcggggtataaaatattaatgttgtttgttacgatatcgttttttttattcgggtagagttgcggttttcgggcgttgcgcgtggcgttttttattacggagggaaagtcgcggtttcgcgggaaaggagtgaaaatcgagtgtgggtgaagaggagagggaggttagggggtaagggaagaaagtagataaatgtattttttttagtagttaagttggaaatttgtgttgaaagt

SEQ ID NO: 43 - DNA, 8500 bp, Artificial Sequence
  chemically treated genomic DNA (Homo sapiens)
atttttagtataaatttttagtttggttgttagggaagatgtatttatttgttttttttttttgttttttgattttttttttttttttatttatattcggtttttatttttttttcgcggagtcgcggtttttttttcgtgatgaaaaacgttacgcgtaacgttcgggagtcgtagttttgttcgggtggagaaagcggtgtcgtgataaatagtattgatattttatatttcgattttgcgttatatacgttttttagaaatagatttagggttgcgaagaagttcggataaggcgaagatttttggagagtttggggacgtagtcgttcgggagaggaattaggtttttttgtgatttttttgttttttatggaaattaagaaatagtttttaaaatagagtttttggggtagagagcgtaggtaattttttttttagttttttttttagaggagtagtcgaagcggtttcggggaatggaaaaggtaggtgtttatgaaggagatggagttttggggggtagttagttacgttttgtaggttttagttcgcgttcgggtcgttggtgcgcgtttttttcggcgttcgttttcgatgacgttgaggttttggggcgttgtggtcgcgttttttttttttttttttttttacgtcggattcggtcggtattcggtttttttttttttttttttcgcgtttatttgttgtcgttcggttcgagtcgtgttcgtttcgtcggttgagtgtaaaagggtttgatttgcggttgatttcgggttagtattttttttttattaattttgttttttttttatataaaattttcggtttcgtttttcgtagtatttattttaatttttattcgtttttcgtcggcggttgatatcggcgcggatttgagggagatgggtttttagggcgttcggggatttttgcgttttttcgtttcgaggttgcggggacggggtcgaggtaatgaggggattagtagggggagcgcgggtcgtttcgagattcgtgttttatttcgtttcgattttcgattgggcgtttaagggtcggagagggacggagaggggagtcgcgcgcgggtttcggcgggggagttttaaagataaagaggaggtcgggtcgcgttgagagaggtcggcggcggagacgtagttcggtgcgggagttagagggcggtggagacggtatagggattggagaggcggtgggagtggatggcgggggcggggagggaacgtcgtgtgtcgggattttaaggatagcggcgcggtgtgcggggtttagtcgcgggtagagtcggagaaagggcgatttggagaggcgtaggtaggggggtgcgttcgggaggttcgaggtttcgaggaggttcggttattttcgttcggaggggatacgttcggattagtcgtagacgtcgttcggttttcgggggcgggaggagcgtggtttcggcgggcgcgtagttggagaggaagggtcggggagggaggagggagagagggagggaagaacgggggaggcggggaggaagagggaggaggagagttcgtttttaggtaaggggaggtgatttcgaggtttggttcgggcgggagtagaggattgggtgaggggtttttgcgtttttatttttcggtttgggtttttacgcgagttttttcgtcggttttcgtttcgttttgacgtcgttttatttcgtcggatattgggggttcgtatttcgtttatttttttttatttggtttggttttttagtttcgttagatagttacgttggaaagagagtcgcgttaaggttaagtttgttttttatttgaagtttttaaggatttagatcgggggttaaattttgtcgtcgacgtttttggagtcgttgttttcgggtttaggtcgagcgtgggtggggagggggcgggagtcggtcggagttcgacggggtcgagggggcgttggagttcgggttggtttgaagcgagttttcgggggggggcgggtatacgttcggggatgggttttttgaattaattggaatttttcggagatagaaatttgcggcgtttagtttttgtcgggggaatgaaacgcgggagtatgagtgtcgtttttttatacgcgtgattttaatagatttattagttacgttttcgacgcgtatttggagattacgttgtgttcgagttttttttaaaattaatttatttagtacgttacgggtgggttttttcggggaaggggacgttaaaattttaataataaaaggggcgggtgagttgaaaaataaaataaggtaaaaatagaataaaataaagtaaaaaaatttttaagtaaatttttttatttttagtttggagggtagggttcgagcgtaatggtagatttacgaagttatattgtcgttttcgtagaaattgatgtaaattttgtattaggttttaaagatttttattcgttttttttatacgggttgtaaatataattggattaagcgatagaagtattattttgtgatttgggaagtgaatgaagtcgttatataatataataattattattatatagtattttatttcgtgaatacgatgagtgttattttggttaagtatcgaatttatagtcggtttagggtttattgtaattttttttttattaatttgaattggagcgatattgttgggggcggggaaggggggatagaattttaattttgagatgaattttagttaatttttttgtttttattttgtgatatttttaaatggagttattaaaaatttatatttgtttttttttgtgttgttttaattaataaaataaggaaataaggtggttggagtatttggtattggttattttagttgattgtgtacgaagtatttgtaataagatgttaaattgtaaaagttgtttgtttggcgtttcgggcgtattaatttagttttttatagtttgtgtttttaaagtggggtttatattttaattttgagttaagatttagatgttaataattggatatagaaattttagggtatatataggggagtataggggttagattgagagtggacgttagttaaagaattttagagagagttttttaagtttgtatattttagagaaaatttttaaggttttattggatttttaaggtttcggtgagttaatagaataagtattataaaattttttaaattatttttcggagaggattggggaggtttttatttcggattaagtcgtagtggtgtttagttatttatgggcgtatagatttttttagaaataattgttttagaaaggattaaatagttaaaagaaataaaaataaagaaaaagaaaagagggggggggtttattattttgttagaaagtagtggatattatttttgaatttttttgtaattattttaacgaatgagtggtttaagtaaaattattaaaatgattttttaaattatacgttaattgttagattagtattatatttaaagttattttcgaatgtaggttgaattcggtttttattaaatttatagtataggtttatttttggacggatagtttatattttaggataaggaagggtgttgagaaagcgaggggaaatttaaggttgttgaaataaacgtatttttatttgggttttaagtgttttttttttttaaaaatataattttattttaacgttgtgattaatttttaaatgtatttgttatagtataatttttaaatgtaatatttaatgttgttagattatttgaagataaagttttatagaaatttttaaattttaaaaaaaaaattgtaatgtattaataaatatttagaaaataatataattaaaaaatttaaagtattaaataattttaagatttcgttaggaataatgaataaggtattttgcgtttatatcggttagtaatttgtattttagtttacgcgggggagggtgatggtcgatatttttgtgtgtgtgagaatttagtataattattttgttcgtttttttaagagaaagaagttagggggaggggtagaggatggacggagggggttcggttgtagtacgttttggtttagcgattgtgtttttttgaaatatatttagataaattttgttcgaaattttaattgttggggaattgggaaattcgtgatttgttttggtttttgttttttatttatggtttggtttagggttttattattggggttttttttttttttttttttttttggattaaattgtggcgtagatttttagttaggtggaaggcgtttcgtttgtagtaaggtaacgcgtagtagttttagtcgttcgtagtgaaatagtcggagtagaagatatttttatttttcggttcgtattaatatttagttttataaaataatttataggttttaattttttttttttttattgaaaaaggttttttgaaaaattttgtttttttatttttcggggtttttttatttttagtttatatagataatttttttgttagatttttttattgtattttgaatttataaaatatgtatataaaaatagtatgttataaatttatggagaaaatgggttttgttttttaaatttgttgattcgaaatattttgggtggggggttttttttcgtttttagaagaaaggttttttagaaaattatgtatataatttgatttttttttttcgtattgtaacgtcgaaaataaaattttttataatgtatttataagaaataatataaaatttaaaaaaaaaaatggaaatgtttagatatataaagttttataaaatttagaatataatttcgtcgtttgaaggagggggtggtggtggtaatttttttgtataaattaataaattaatttaaaagagcggtaataattataaaaaatttgtaagtgtttggatttgttttattatatttataataaatgcgacgagtttcgcgttatttgggtttcggcggtcggcgtcgttcggaagtaacgcggaggaaagtgagcgcgtcggtcggtatataaaagtgggtttcgtttttcgtttcgttttgatttttttgttttttcgagtaaagaaaacgtttttcgtttttttcgtaggtgataaatattgtataaaaagttttaagaaaatatcgaagtttagtttaaaatttaagtttggtgttagcgttcggcggtcgttagggttttcggggaaggtgagtgggggatacgcgttattcggcgttcgtttttagtattttttttttgataagaatgtgggaacgtttgtataaaagttacgtcgcgtcggggcggggcgggagtcgggcgcgggtcgcgagttcgtgggtcgtcgtcgtagagttttcggcgtttcgaaggcgttagatgtgcgttaggggtatcgtgtcgtttacgttcgcgttcgcgttttggtagtgttgcggtagcgagtgtagtcggttttgcgtcgcggtcgttgttgtcgtcgtcgggtcgtttttttcgtcggcgggtaagtatatgttgattatttcgcgtaggttttcggggtacggcgttcgcgagtgcgttggggcgggcgggttgtcgttgggtttcgattttattagagagtttagcgcgtttagggcgttcgacgacgcggtcgtcgtcgtcgtcgtcgtcgttacggtcgagttttggtgcgcgtcgttcgtagcggcggcggcggcggtcgcggcgtcgtaggggaggtcgtcgtagttcgagggcgacgcgtttatgtagttttgcgagttggagatggggttgtattgtagcgcgtttatgtcgtagcggtgtatgggttgcgggttgtgcgggtgcgcgtgcgggtggtgcgggtgcgggtgcgcggggtgcgcgtgcgggtgcgcgtcgttcgcgttcgggtgttgttcgtaggttagttgcgttttttgtattatggtcgcggtcgtcgtcgtcgtcgttatcgagtcggggtaggcgtcgttggtttagtcgttgacgtgcgcgtagtcgtcgttcgtcgcgtcgtttgggttttttaggcgttggtttacggtcgtcgcgtttacgtttacgtttacgtttatggttatagtcgcgtcgtcgttattcgcgtcggtcgttaggagttcgtcggttagcgagtatttgttttttttgagtagcgttttggttttgcggcgcggtcggtatttgtaattcgggtgtttttttatgtgtagcgcgcgtagtcgtttggtttcgtcgatgaacggtcgtttttcggtttcggatatgattttttattcggtttttaggcgtttgttgattttcgagttgtgtattttggggtttttttgggttattttgcgtcgttgttcgcgggattatattatgaaggcgtttatgggtcgtttgattcggttttggttggttttggcgttttcgtcgtcgtcgtcgttttcgttttcgttttcgtcgtcgttcgtttcggcggggttcgagaggttcgtgggggtttgggcgtcgtcgggcgagtgtaggtcggtttttattattatgttgtatatcggggcggttggcgggtttatcggtatcgcgaggagagggtttggagtatagacggtcggggtgggagggagacggagaggaatttagacggagtgagacgggggcgggggggttttagcggagagaagaatggggaggggtggaggtaacgataataaaaaaaggtagaaatatacgtattcggcgtcggttcggttcgtaggtggaaagttttttttgatgtataaattatttgttaaagaggtcgacggtcggggtcgtcgttttcgtcgttatcgtagtttaggcgttttcggcggagcggtgtaaataggtgtagtcgtggttaagttgtagtttcgtttttggggtcgggagcggtgcgttgggttcggttcggggtgtgttgttttttcgtcggtcgtcgttgcgcgttgtttttttttttttgcgttcggtttttagcggtttttaattcggaggttgtaatttttagtagggcggcgcgtcgcgtgcgttgggtatgtgttggttttaggtgttcgggggaagttaggcgttagtggcggggggggggaggcgtaggggggtttgtagggggcgattacggtgtagttagggaggggttcggggatagcgggaggagcgcgggttcgcggagagggtcggagagtcggggtcgtcgagttcgggatgggttgttcgttgtttgttcggggtcgtgcgttcggagcggaggcgtacgcggggtcggcggcgcgcggggtttagtagttatacgtcgggttcgggttgttattaaatgagcgcgtcgcggttaatgggagtcggcggcggcggtgatttgtatggcgcgttggcgagtgacgtggggagggagtagatatattgggcgcgggcggcggagcggggaggaggggaggaaggagggggagtaaagtaggaaggaggggggaggaggttcgggagggggtgatagttatatcgttttttgagcgcgcgcgcgcggcggcggcggcggcggcgaatttcgagttcgtttttttcgtcgtttttcgttcgcgcgtttcgaatgattaacgattgggttgaaaagcgaagattaagaaaggatcgtcgtggggtggggggaggaaacgtagtttttggttaggtttaaacgggcgtagtggagatttagttttttttttgttttcgtcggttaattttgtgtttgtagggaaggggaaagttgagtgcggggttggtacgtcgtttttagttttttcgagtgttgaaaaggaggggcgtttttttggacgtaggggatatttttcgagggtttttgtaggttttttgtaaggattaggcggtttagttatttttcgttttgtattcgttttcggtcgcggcgtgtattgaagttcgttagtgttcgtttttgtagcgaaggtttttatagtttaggttttataattcgggtaaagggggagtatttgtgtgggtatggttttatagtttcgtttagtattagttttaaatttttgtggggaggagttttttaatgagttcggggttatagttacgtattttttttaattcggattttttttttttggaaaaggaatttttaggaaggtcgaatataataagatttatttggaatttagtttttgaataatagttgaaaaagtttgttgaatcgtaaaataatgatatggcgtacgtttttttggagtgaattttttacgagttggttgtttaagaacggagaaaattgcgtgaattgcgcggggttatataaatcgaatgaaaggcggggttttaggacgggttttagtcgtcggtttgcgttatgtaaaggaaaggtttggttcgtggaaagagtaaggtatttatttgtggttattatttttaaattttaaagtggttttgatttgggaacgtgaaagagatttttaaacgtagttttaagtagt

SEQ ID NO: 44 - DNA, 263 bp, Artificial Sequence
  chemically treated genomic DNA (Homo sapiens)
tatagtatttattatttacggaggaagcggaaagcgttttttttgttcgaggggataaaaaagttaaaacgaggcgagaggcgaagtttatttttgtatatcggtcggcgcgtttattttttttcgcgttgttttcggacggcgtcgatcgtcggagtttaagtgacgcggagttcgtcgtatttgttataaatgtagtaaggtaggtttaagtatttataagttttttgtagttgttatcgtttttttgggttggtttgtta

SEQ ID NO: 45 - DNA, 263 bp, Artificial Sequence
  chemically treated genomic DNA (Homo sapiens)
taataaattaatttaaaagagcggtaataattataaaaaatttgtaagtgtttggatttgttttattatatttataataaatgcgacgagtttcgcgttatttgggtttcggcggtcggcgtcgttcggaagtaacgcggaggaaagtgagcgcgtcggtcggtatataaaagtgggtttcgtttttcgtttcgttttgatttttttgttttttcgagtaaagaaaacgtttttcgtttttttcgtaggtgataaatattgta

SEQ ID NO: 46 - DNA, 3300 bp, Artificial Sequence
  chemically treated genomic DNA (Homo sapiens)
gatattgtgtgggagttttttggggtttgatttgtgtttttttattagttttttttattttagttagttttagatttaagggaataggataaatgtttttagtttgattttgttagtttgtttttataattaagataaaatgaaaaaatagtaatagaagtaaatataaaaaagttttaaatggaaatttgttgggattttgttttattttaaattttgggttagtgttgttttttttttttttttttaagtattttttttttaagtttggttgtttttttatatttgttttttgtttttggtttttaatttggtttttgtaaaatttattgaagttttttttttttttttttttttagttttataaaatttgttggtagggtttgtgggagttgtggggttttgttaattttggggttgggttgggagttgagtgtaggtggttggagggtaatggagtaagtgatagttttaggtgtttttgggtttttggttgggagggaagagttgaggattttgggttgtattgtgtagatggagatgtgtttttagagtttttgggtaggtttagggattttgtgatttgttttggtttagtggtgtgattttgtgggttttggtggttttgattgtttgtaggggaggggtgtgttatttttggttgttttaggatgtgttgtttgaatttttttttttttgtgggtagtgtttgttatattttttgggttttttggaaattttaattattttattaggattattggggtttggggtagttttttgggagttgtgtggatgagttttggttaggtgggagtgaagagttttggtgattgttagtttttttgtttttgtattgttgggaaaggatggtgttttaatagataggtagtaagtttattgaggttgaagaatgaagtttttttagggttggtgggttttgagattaatgagtttaataagaaaattaagtagggttatgatttagaaattaaagaatatggggttaggagaagaggttagttatgatataggtagtggtttgtttttttttgattttttaaaggtgttttttttttagttttttttgattttagggatttgtaatttgggatttaaagtttttgagagggtagaatgattatttaaaatgaattgtgttagtgagtgttgttgttttttttaatggttttggaagattattgttttgggttttaggtgtgttttgttttgtgtttatttttgatattatttttaagagtgttattgtggagtgggtgttttttggatgttgtggggttatttgggtttggtaggttatttgggtttggtagattttgggtgggttttgagggttgagttaggtttaagagggtgggtggggttgtggggtattgataggttgagggtagggaattgatttggtttatgtagatttttgtgttgttttttttttgtttattgtagttattggttgatttttgatttgttttttgttttttggggttgtttatttaatttattagttttttaaattttttttgggattttagtggtgagtatttgttgttggttttttagggtaggtagtattgttgttttaggtgtgtggagttggggagaaaaaaattgaatatgtgtgttatttagggtttttagataagtttttttgtgtgtatatatattttgaattggagtttagaaggttggatttgtgttttggggttgagttttttattttttgtttttagtttggaagattttagtttgtttgaaggtggtgtttgatttgttggtggatttggtgggtgtttgtttttgatatttggggatgaggtgggagtgttttgagtgttgggaagttttgttttgtgagtttttggtagtgatatgtgggagtgttgggtttggtatttttgatgtttttgaggttttgggtggttgttttgtttttttgggggtttttattttttaagtggttttaaatgattgaggatgggttttttgtgttgttgtagttgttattttttttgggaaaggttagtgattttggatgtgtaggttttgaaaattaaggtttagatttatattgagtgtttaaagattgtatttgaattttttttgttggttattgagggagagaaaggaatgtttagttttatttatatttatagaaagaagtgttgagggtgggggaaatgtagttttgttgggtgagttgggataggttttttgtttgttttttggttgttgtttttttttagttgaatggggagtgatttgttttgggtgtggtttttggggttgaagattgaggtgtagttttatttttggtttggtagtggtttggaagagagagggaaaggaggaatatttatttggttaagagatgttgttagagtttttaaagttggtgggggatggaggttggggttttggatttttagagtgtttgtagttgggtttttgggttttttggtgtggggaatttgattttgtagtttttgttagggtgtggtggggttgtaagaagggaggaaggagtgggattagagtttttgagggtgtgggtggtgtgtatttagttttgtttttttgtgtgttttgttgtttgtttgttttttttgttgtattgggtggttttggtttttgtgtttgtttgtttttgatgtttttgtgtggttttgtgttgtttgtggttagttttgttttgttttgtaaggagtgtgttgtttttttaattgaaatgggattaagattttagggtttttttgtttttttgttttgaggtgataggattttagttaatagattgaaaatgtgaaaagtatttgttgttttttgttttaagtgtttttgtggaaggattatttatttggaaaagtagaataaattttgttgttgttttttttttggaggtgtgtttattttagagtttttagatttattggtatttgttatatttttttttgggttttataggtaggattttaagaatgatatgggggtatttgggtgatttgtgggttgtaggtttttaagaggttgtttttttgtgtatggaagtgttgtagttttattttagtggaagtaatattaaattttattttagaggtttgttttgtaaagaatttagagtttattatatttgatattattttaaaataatatttgtttgttttaagaagttgggagaaattgataaaagaaaagttgaaatttatgttttttatttttattttaggagataattttgattaatagtttggtttgttttttatttttattttttaaaaataa

SEQ ID NO: 47 - DNA, 3300 bp, Artificial Sequence
  chemically treated genomic DNA (Homo sapiens)
ttgtttttaaggaatgggggtagggagtaaattaaattgttgattaggattattttttagagtagaaatgggaagtatggattttaattttttttttattgattttttttaattttttaaaataagtaagtgttattttaaaatagtgttaaatatagtaaattttggattttttgtaaaataaatttttaagataaggtttgatattgtttttgttaaaataaagttatgatatttttgtgtatgaaaaaatggttttttgaggatttgtaatttatagattatttaggtgtttttatattatttttgaaattttatttgtaaagtttaggaggaagtatagtgaatgttagtgggtttaggagttttggggtgagtatgtttttggaaggaaaatggtaatagaatttattttgtttttttaagtaaatgatttttttatagaggtatttgggataagaggtgatgggtattttttatgtttttgatttattggttaagattttattattttaaaataaggagatgaggaaattttgggattttgattttattttgattgagaaaataatatgttttttgtgaagtgaaatggggttggttgtgggtagtgtggaattatgtgaaggtgttgggggtgggtgggtgtggggattagggttatttggtgtagtaaagggggtaagtaggtggtagggtgtgtggggagataaggttgagtgtatgttgtttgtgtttttgaaggttttagttttatttttttttttttttttgtagttttgttgtgttttggtgaaggttatagggttaggttttttgtattgaggagtttagaagtttggttgtgggtgttttgaagatttgggattttggtttttgttttttgttagttttagggattttggtggtgttttttagttgggtagatgtttttttttttttttttttttttaagttgttgttaggttgggggtgaggttgtattttagtttttagttttgaaggttgtgtttggggtgggttgttttttatttagttaagaggaagtagtggttggggggtaggtgaggaatttgttttggtttatttggtaagattgtgttttttttatttttggtgtttttttttgtgaatgtgaatggaattaagtgttttttttttttttttaatggttggtgaggagaatttaaatgtggtttttgggtgtttggtatgggtttggattttggtttttagagtttgtgtgtttaaggttgttagttttttttgaaggaagtgatagttgtggtggtgtgggaggtttatttttggttgtttaaagttatttaaggaataaaagtttttgagagagtaaaatgattatttgaaattttggaagtgttgggggtgttgggtttaatgtttttatgtgttattgttggggatttgtgaggtgaagttttttagtgtttaaggtgtttttgttttgtttttaggtattaggaatagatatttattaggtttattagtgggttagatgttgtttttgggtaggttgggattttttgaattgggagtggagagtaaggggtttgattttgggatgtgagtttggttttttggattttggtttagggtgtgtgtgtgtgtggaggggtttatttgggggttttgggtagtatatgtgtttggtttttttttttttgattttgtatgtttggagtggtaatattgtttgttttagaaggttagtggtgagtgtttgttattagggttttagggagggtttggaaaattgatgagttaagtgagtgattttaggggatagagggtgagttgagagttggttaatggttgtggtgggtggggagaagatgatgtggggatttgtgtgggttgggttaattttttatttttgatttgttgatgttttgtggttttgtttgtttttttaagtttggtttagtttttagggtttgtttgaagtttattgagtttgagtggtttattgagtttgagtggttttgtagtgtttaggaggtgtttgttttgtggtggtgtttttggaggtggtgttggaggtaggtatgggataggatgtgtttggggtttggggtggtggttttttagggttgttggggagggtggtagtatttgttggtgtagtttgttttggatggttgttttgtttttttgggggttttgaattttaagttgtagatttttgaggttggaggaggttaggagaagggtgtttttggaggattgggaggagatgggttgttgtttgtgttgtggttgatttttttttttgattttgtgttttttaatttttgagttatgattttgtttggtttttttattgggtttattgattttaagatttgttggttttgaaggggttttattttttagttttggtgaatttgttgtttgtttattaaaatgttatttttttttggtggtgtgggggtgggaggattggtagttgttgaggttttttgtttttatttggttagggtttgtttatgtggtttttgaggggttattttaggttttaatagttttggtagaatgattggagtttttgaggaatttggggaatgtggtggatgttgtttgtgagggaaaagaggtttaggtggtgtattttagggtagttaaaagtggtgtgttttttttttgtgggtagttaggattgttaggatttgtggggttatattgttgggttagagtaggttgtggggtttttggatttgtttgggggttttgggagtgtgtttttatttgtgtggtgtgatttagggtttttggttttttttttttagttgagggtttaggagtgtttggagttgttgtttgttttattgttttttgattgtttgtgtttggtttttggtttagttttgaggttggtagggttttgtggtttttatagattttattaatgagttttgtaggattgagaagaaggaaggaaagggaattttaatgggttttgtaggaattgggttgggggttgaaagtggagagtgggtgtgggaaggtggttgggtttagggaaggggtgtttggagagggaaggggaaggtaatattaatttggaatttagagtagggtaggattttggtagatttttgtttggggtttttttgtgtttgtttttattgttgtttttttgttttgttttaattgtgggagtgggttggtgggattggattgggggtgtttattttgtttttttggatttggggttggttggggtggaggaggttggtggggaggtgtgggttggattttgggaagtttttgtgtggtgtt

SEQ ID NO: 48 - DNA, 2700 bp, Artificial Sequence
  chemically treated genomic DNA (Homo sapiens)
ggtttttaatttggtttttgtaaaatttattgaagttttttttttttttttttttttagttttataaaatttgttggtagggtttgtgggagttgtggggttttgttaattttggggttgggttgggagttgagtgtaggtggttggagggtaatggagtaagtgatagttttaggtgtttttgggtttttggttgggagggaagagttgaggattttgggttgtattgtgtagatggagatgtgtttttagagtttttgggtaggtttagggattttgtgatttgttttggtttagtggtgtgattttgtgggttttggtggttttgattgtttgtaggggaggggtgtgttatttttggttgttttaggatgtgttgtttgaatttttttttttttgtgggtagtgtttgttatattttttgggttttttggaaattttaattattttattaggattattggggtttggggtagttttttgggagttgtgtggatgagttttggttaggtgggagtgaagagttttggtgattgttagtttttttgtttttgtattgttgggaaaggatggtgttttaatagataggtagtaagtttattgaggttgaagaatgaagtttttttagggttggtgggttttgagattaatgagtttaataagaaaattaagtagggttatgatttagaaattaaagaatatggggttaggagaagaggttagttatgatataggtagtggtttgtttttttttgattttttaaaggtgttttttttttagttttttttgattttagggatttgtaatttgggatttaaagtttttgagagggtagaatgattatttaaaatgaattgtgttagtgagtgttgttgttttttttaatggttttggaagattattgttttgggttttaggtgtgttttgttttgtgtttatttttgatattatttttaagagtgttattgtggagtgggtgttttttggatgttgtggggttatttgggtttggtaggttatttgggtttggtagattttgggtgggttttgagggttgagttaggtttaagagggtgggtggggttgtggggtattgataggttgagggtagggaattgatttggtttatgtagatttttgtgttgttttttttttgtttattgtagttattggttgatttttgatttgttttttgttttttggggttgtttatttaatttattagttttttaaattttttttgggattttagtggtgagtatttgttgttggttttttagggtaggtagtattgttgttttaggtgtgtggagttggggagaaaaaaattgaatatgtgtgttatttagggtttttagataagtttttttgtgtgtatatatattttgaattggagtttagaaggttggatttgtgttttggggttgagttttttattttttgtttttagtttggaagattttagtttgtttgaaggtggtgtttgatttgttggtggatttggtgggtgtttgtttttgatatttggggatgaggtgggagtgttttgagtgttgggaagttttgttttgtgagtttttggtagtgatatgtgggagtgttgggtttggtatttttgatgtttttgaggttttgggtggttgttttgtttttttgggggtttttattttttaagtggttttaaatgattgaggatgggttttttgtgttgttgtagttgttattttttttgggaaaggttagtgattttggatgtgtaggttttgaaaattaaggtttagatttatattgagtgtttaaagattgtatttgaattttttttgttggttattgagggagagaaaggaatgtttagttttatttatatttatagaaagaagtgttgagggtgggggaaatgtagttttgttgggtgagttgggataggttttttgtttgttttttggttgttgtttttttttagttgaatggggagtgatttgttttgggtgtggtttttggggttgaagattgaggtgtagttttatttttggtttggtagtggtttggaagagagagggaaaggaggaatatttatttggttaagagatgttgttagagtttttaaagttggtgggggatggaggttggggttttggatttttagagtgtttgtagttgggtttttgggttttttggtgtggggaatttgattttgtagtttttgttagggtgtggtggggttgtaagaagggaggaaggagtgggattagagtttttgagggtgtgggtggtgtgtatttagttttgtttttttgtgtgttttgttgtttgtttgttttttttgttgtattgggtggttttggtttttgtgtttgtttgtttttgatgtttttgtgtggttttgtgttgtttgtggttagttttgttttgttttgtaaggagtgtgttgtttttttaattgaaatgggattaagattttagggtttttttgtttttttgttttgaggtgataggattttagttaatagattgaaaatgtgaaaagtatttgttgttttttgttttaagtgtttttgtggaaggattatttatttggaaaagtagaataaattttgttgttgttttttttttggaggtgtgtttattttagagtttttagatttattggtatttgttatatttttttttgggttttataggtaggattttaagaatga

SEQ ID NO: 49 - DNA, 2700 bp, Artificial Sequence
  chemically treated genomic DNA (Homo sapiens)
ttatttttgaaattttatttgtaaagtttaggaggaagtatagtgaatgttagtgggtttaggagttttggggtgagtatgtttttggaaggaaaatggtaatagaatttattttgtttttttaagtaaatgatttttttatagaggtatttgggataagaggtgatgggtattttttatgtttttgatttattggttaagattttattattttaaaataaggagatgaggaaattttgggattttgattttattttgattgagaaaataatatgttttttgtgaagtgaaatggggttggttgtgggtagtgtggaattatgtgaaggtgttgggggtgggtgggtgtggggattagggttatttggtgtagtaaagggggtaagtaggtggtagggtgtgtggggagataaggttgagtgtatgttgtttgtgtttttgaaggttttagttttatttttttttttttttttgtagttttgttgtgttttggtgaaggttatagggttaggttttttgtattgaggagtttagaagtttggttgtgggtgttttgaagatttgggattttggtttttgttttttgttagttttagggattttggtggtgttttttagttgggtagatgtttttttttttttttttttttttaagttgttgttaggttgggggtgaggttgtattttagtttttagttttgaaggttgtgtttggggtgggttgttttttatttagttaagaggaagtagtggttggggggtaggtgaggaatttgttttggtttatttggtaagattgtgttttttttatttttggtgtttttttttgtgaatgtgaatggaattaagtgttttttttttttttttaatggttggtgaggagaatttaaatgtggtttttgggtgtttggtatgggtttggattttggtttttagagtttgtgtgtttaaggttgttagttttttttgaaggaagtgatagttgtggtggtgtgggaggtttatttttggttgtttaaagttatttaaggaataaaagtttttgagagagtaaaatgattatttgaaattttggaagtgttgggggtgttgggtttaatgtttttatgtgttattgttggggatttgtgaggtgaagttttttagtgtttaaggtgtttttgttttgtttttaggtattaggaatagatatttattaggtttattagtgggttagatgttgtttttgggtaggttgggattttttgaattgggagtggagagtaaggggtttgattttgggatgtgagtttggttttttggattttggtttagggtgtgtgtgtgtgtggaggggtttatttgggggttttgggtagtatatgtgtttggtttttttttttttgattttgtatgtttggagtggtaatattgtttgttttagaaggttagtggtgagtgtttgttattagggttttagggagggtttggaaaattgatgagttaagtgagtgattttaggggatagagggtgagttgagagttggttaatggttgtggtgggtggggagaagatgatgtggggatttgtgtgggttgggttaattttttatttttgatttgttgatgttttgtggttttgtttgtttttttaagtttggtttagtttttagggtttgtttgaagtttattgagtttgagtggtttattgagtttgagtggttttgtagtgtttaggaggtgtttgttttgtggtggtgtttttggaggtggtgttggaggtaggtatgggataggatgtgtttggggtttggggtggtggttttttagggttgttggggagggtggtagtatttgttggtgtagtttgttttggatggttgttttgtttttttgggggttttgaattttaagttgtagatttttgaggttggaggaggttaggagaagggtgtttttggaggattgggaggagatgggttgttgtttgtgttgtggttgatttttttttttgattttgtgttttttaatttttgagttatgattttgtttggtttttttattgggtttattgattttaagatttgttggttttgaaggggttttattttttagttttggtgaatttgttgtttgtttattaaaatgttatttttttttggtggtgtgggggtgggaggattggtagttgttgaggttttttgtttttatttggttagggtttgtttatgtggtttttgaggggttattttaggttttaatagttttggtagaatgattggagtttttgaggaatttggggaatgtggtggatgttgtttgtgagggaaaagaggtttaggtggtgtattttagggtagttaaaagtggtgtgttttttttttgtgggtagttaggattgttaggatttgtggggttatattgttgggttagagtaggttgtggggtttttggatttgtttgggggttttgggagtgtgtttttatttgtgtggtgtgatttagggtttttggttttttttttttagttgagggtttaggagtgtttggagttgttgtttgttttattgttttttgattgtttgtgtttggtttttggtttagttttgaggttggtagggttttgtggtttttatagattttattaatgagttttgtaggattgagaagaaggaaggaaagggaattttaatgggttttgtaggaattgggttgggggtt

SEQ ID NO: 50 - DNA, 280 bp, Artificial Sequence
  chemically treated genomic DNA (Homo sapiens)
tagagtttttgagggtgtgggtggtgtgtatttagttttgtttttttgtgtgttttgttgtttgtttgttttttttgttgtattgggtggttttggtttttgtgtttgtttgtttttgatgtttttgtgtggttttgtgttgtttgtggttagttttgttttgttttgtaaggagtgtgttgtttttttaattgaaatgggattaagattttagggtttttttgtttttttgttttgaggtgataggattttagttaatagattgaaaatgtgaaaagta

SEQ ID NO: 51 - DNA, 280 bp, Artificial Sequence
  chemically treated genomic DNA (Homo sapiens)
tattttttatgtttttgatttattggttaagattttattattttaaaataaggagatgaggaaattttgggattttgattttattttgattgagaaaataatatgttttttgtgaagtgaaatggggttggttgtgggtagtgtggaattatgtgaaggtgttgggggtgggtgggtgtggggattagggttatttggtgtagtaaagggggtaagtaggtggtagggtgtgtggggagataaggttgagtgtatgttgtttgtgtttttgaaggtttta

SEQ ID NO: 52 - DNA, 1968 bp, Artificial Sequence
  chemically treated genomic DNA (Homo sapiens)
attttttaaaattttataagtgttttaggaatgatttggtgttttttatgtttttagagtttaggttttttgtgttttatgtagtgtatagatttgtttttgggttattttttatattaaattttagttttttttattgggtataaagggaaattttaaaattttgttttttatggaaaaatgttttttgttttttggggtagattttgtagggagagatttgtaaatatgaaggaggagtggaaggtgtgattggagaaaatattaaggattgaagtgtgaaggggtatgggatggattggaggtagttttgagatgagagtttgttgaatttgtgttttgggagattaagttggttttttttggaaaaaatttgtaagtttgggaaagttgggattggtttttattataagtagttgggatttaagtttatttgtattagggttattttagtttagttttgttgggaattgtattgggatgggtgtgggatggttttgaatttagatttgggtgttgttttttttaggtagttttttggagtttgttttttggattataaaatgaagagttgtgaagagttaataatgttaagttggaagggtttgatatggaatttgattaaggttggatttttaataattgtgattttttttttttttttttttttttggtaaaattattttatgaatttatgtaagtagggttttttgttattttttggagtagttgtttgagggttggaaggagtagtgatagaaattttagagatgtagagattttttgaattttgaatttgattattgtttttttttgattgttgaatttgttggagaagtgggtgtgatagggtgatgagttaatgtggagggagtgtggaggttgtggaagttgggggtgttgggttttaggtttggatgttgagtgtggattggtgtgttttttttatagtgtttttgtgtggtttttttttgttgtgttttgtatggtgatttgttgtgggtagttttggtgtttggttatgttgttggttgaggattgttagagttggggggagattaaagtatttttatggggtttaaagagtttgggattgtagtgttgttagtttggttttgttgtgttaataaatttttggtgaaagttgggagtaggagtggaggtttggggtgggggttggtggggtgtgggggttggttggagggagggtttgggggttttttgtatttgtgtttttgttgtgttaagttagtgggaagtaagtgatattttttttttatttgtttttttggaatttgtttattttttttttttagaatattgtttgttttttggggttagtattattaaagagaagattttttttaggtttttaaaatttatgtggtgttttgttataaggagtgtgttggaagttggttttggtatttttttgtttttttttttttttgttttgtttttatatttttgtggagaaatttttgagtaggttttttgtatttttttattttatttagaattataaaaaatatatgggaaggtgatttggttttattttaatttttttattttgtagaagtttaaagtggtgatggtgagaaaagtggtttaaggttaagggttattttagttggtaaaattaggagtagaataggagaatttttagagttttattatatattttttgttatttattttatggataaaaataattatttttttaggtaggttaagtattttttaaaggtgtttgtgtttttgttagttggttgtaaaatttagtattatatttgttatttggatattatggggagttgttggttatttaatgatagagttgagtatattttgattttttttttgagatattttttttttatttttattttattttgaaaaatattatggagtatgtgttttgggtaagtttttttttaggtgtgggtaaaatttgagtatagggatttt

SEQ ID NO: 53 - DNA, 1968 bp, Artificial Sequence
  chemically treated genomic DNA (Homo sapiens)
agaatttttgtgtttaaattttatttatgtttgggagaagatttgtttagaatatatgttttatagtgttttttaggatggagtgggagtgagaaaggagtgttttagaggagggattagagtgtatttggttttgttgttggatagttagtgattttttatgatgtttaggtgataagtgtgatgttaagttttgtagttaattggtaaaagtatagatatttttaaagagtatttgatttgtttaagagaatgattatttttgtttatgaaataagtagtaaaaaatatatagtaagattttagggatttttttgttttatttttggttttgttaattgaagtaatttttgattttgggttattttttttattattattattttaggtttttgtaaaatgaagaggttgaagtgaaattaaattatttttttatatattttttgtagttttaagtggggtgagaaaatgtaaaaggtttgtttgggggtttttttatggggatgtgggggtggggtaggagaaagaggggataaggagatattaaagttagtttttagtgtgttttttgtaataaggtgttatgtaaattttaagggtttggaggaaattttttttttgataatgttgattttggagagtaggtggtgttttaaaggagggagatgagtaagttttaagggggtgggtgaaagggaaatgttatttgttttttattgatttaatgtggtaggagtgtaggtgtaagaaatttttggattttttttttggttaatttttgtgttttattaatttttgttttaagtttttatttttgtttttaatttttgttgaaaatttattgatgtggtgaggttaggttaataatattgtaattttaggttttttgggttttataggaatgttttgatttttttttagttttagtggtttttagttgatggtgtggttaaatgttagggttatttgtggtgggttgttgtgtggggtgtagtgggaggaggttgtgtgggggtgttgtggggaggatatgttggtttgtgtttagtatttgggtttgagatttagtgtttttggtttttgtggtttttgtgttttttttgtgttaatttattgttttgttgtgtttgtttttttagtgggtttggtggttgggggaggatagtgattgagtttgaagtttggagggtttttgtgtttttggggtttttattattgttttttttagtttttaagtggttattttgaagaatgatgaagggttttatttgtgtagatttgtgggatgattttattaagaaggaaaagggggaaaagaaattataattattgagggtttagttttggttagattttgtgttagatttttttaatttgatattattgattttttataattttttattttgtagtttaggaagtaggttttgagagattgtttagaaaaaatagtatttggatttgaatttgaggttgttttatatttattttggtatggtttttagtagaattgagttggagtggttttgatgtaaatgaatttagattttagttgtttgtgatggaagttaattttagtttttttaagtttataggttttttttagaagaagttaatttgattttttggaatatgaatttagtaggtttttattttagaattgtttttaatttattttatatttttttatattttagtttttggtattttttttgattatattttttattttttttttatatttgtaagtttttttttgtagaatttgttttgaggagtaaaggatatttttttatggggaatagaattttagaatttttttttgtatttagtgagaaagattaaagtttggtataggaaataatttaaagataaatttatatattgtatagaatataggaagtttgggttttgaaaatataaaagatattaaattatttttggagtatttgtgaagttttggaaaat

SEQ ID NO: 54 - DNA, 1368 bp, Artificial Sequence
  chemically treated genomic DNA (Homo sapiens)
ggaggtagttttgagatgagagtttgttgaatttgtgttttgggagattaagttggttttttttggaaaaaatttgtaagtttgggaaagttgggattggtttttattataagtagttgggatttaagtttatttgtattagggttattttagtttagttttgttgggaattgtattgggatgggtgtgggatggttttgaatttagatttgggtgttgttttttttaggtagttttttggagtttgttttttggattataaaatgaagagttgtgaagagttaataatgttaagttggaagggtttgatatggaatttgattaaggttggatttttaataattgtgattttttttttttttttttttttttggtaaaattattttatgaatttatgtaagtagggttttttgttattttttggagtagttgtttgagggttggaaggagtagtgatagaaattttagagatgtagagattttttgaattttgaatttgattattgtttttttttgattgttgaatttgttggagaagtgggtgtgatagggtgatgagttaatgtggagggagtgtggaggttgtggaagttgggggtgttgggttttaggtttggatgttgagtgtggattggtgtgttttttttatagtgtttttgtgtggtttttttttgttgtgttttgtatggtgatttgttgtgggtagttttggtgtttggttatgttgttggttgaggattgttagagttggggggagattaaagtatttttatggggtttaaagagtttgggattgtagtgttgttagtttggttttgttgtgttaataaatttttggtgaaagttgggagtaggagtggaggtttggggtgggggttggtggggtgtgggggttggttggagggagggtttgggggttttttgtatttgtgtttttgttgtgttaagttagtgggaagtaagtgatattttttttttatttgtttttttggaatttgtttattttttttttttagaatattgtttgttttttggggttagtattattaaagagaagattttttttaggtttttaaaatttatgtggtgttttgttataaggagtgtgttggaagttggttttggtatttttttgtttttttttttttttgttttgtttttatatttttgtggagaaatttttgagtaggttttttgtatttttttattttatttagaattataaaaaatatatgggaaggtgatttggttttattttaatttttttattttgtagaagtttaaagtggtgatggtgagaaaagtggtttaaggttaagggttattttagttggtaaaattaggagtagaataggagaatttttagag

SEQ ID NO: 55 - DNA, 1368 bp, Artificial Sequence
  chemically treated genomic DNA (Homo sapiens)
ttttagggatttttttgttttatttttggttttgttaattgaagtaatttttgattttgggttattttttttattattattattttaggtttttgtaaaatgaagaggttgaagtgaaattaaattatttttttatatattttttgtagttttaagtggggtgagaaaatgtaaaaggtttgtttgggggtttttttatggggatgtgggggtggggtaggagaaagaggggataaggagatattaaagttagtttttagtgtgttttttgtaataaggtgttatgtaaattttaagggtttggaggaaattttttttttgataatgttgattttggagagtaggtggtgttttaaaggagggagatgagtaagttttaagggggtgggtgaaagggaaatgttatttgttttttattgatttaatgtggtaggagtgtaggtgtaagaaatttttggattttttttttggttaatttttgtgttttattaatttttgttttaagtttttatttttgtttttaatttttgttgaaaatttattgatgtggtgaggttaggttaataatattgtaattttaggttttttgggttttataggaatgttttgatttttttttagttttagtggtttttagttgatggtgtggttaaatgttagggttatttgtggtgggttgttgtgtggggtgtagtgggaggaggttgtgtgggggtgttgtggggaggatatgttggtttgtgtttagtatttgggtttgagatttagtgtttttggtttttgtggtttttgtgttttttttgtgttaatttattgttttgttgtgtttgtttttttagtgggtttggtggttgggggaggatagtgattgagtttgaagtttggagggtttttgtgtttttggggtttttattattgttttttttagtttttaagtggttattttgaagaatgatgaagggttttatttgtgtagatttgtgggatgattttattaagaaggaaaagggggaaaagaaattataattattgagggtttagttttggttagattttgtgttagatttttttaatttgatattattgattttttataattttttattttgtagtttaggaagtaggttttgagagattgtttagaaaaaatagtatttggatttgaatttgaggttgttttatatttattttggtatggtttttagtagaattgagttggagtggttttgatgtaaatgaatttagattttagttgtttgtgatggaagttaattttagtttttttaagtttataggttttttttagaagaagttaatttgattttttggaatatgaatttagtaggtttttattttagaattgttttt

SEQ ID NO: 56 - DNA, 336 bp, Artificial Sequence
  chemically treated genomic DNA (Homo sapiens)
taggtagttttttggagtttgttttttggattataaaatgaagagttgtgaagagttaataatgttaagttggaagggtttgatatggaatttgattaaggttggatttttaataattgtgattttttttttttttttttttttttggtaaaattattttatgaatttatgtaagtagggttttttgttattttttggagtagttgtttgagggttggaaggagtagtgatagaaattttagagatgtagagattttttgaattttgaatttgattattgtttttttttgattgttgaatttgttggagaagtgggtgtgatagggtgatgagtta

SEQ ID NO: 57 - DNA, 336 bp, Artificial Sequence
  chemically treated genomic DNA (Homo sapiens)
taatttattgttttgttgtgtttgtttttttagtgggtttggtggttgggggaggatagtgattgagtttgaagtttggagggtttttgtgtttttggggtttttattattgttttttttagtttttaagtggttattttgaagaatgatgaagggttttatttgtgtagatttgtgggatgattttattaagaaggaaaagggggaaaagaaattataattattgagggtttagttttggttagattttgtgttagatttttttaatttgatattattgattttttataattttttattttgtagtttaggaagtaggttttgagagattgttta

SEQ ID NO: 58 - DNA, 1900 bp, Artificial Sequence
  chemically treated genomic DNA (Homo sapiens)
aaaaatttatttgttgaattgagtggttttggttttagatggttaggtagtttaaaaatatgaagttgaagatggtagttatttaaaaattgttttattgttatttttatgatgataagaaagtaagtagaggtaagggtgttaaatttagaaatagtatataggaatgaataatttttggggatttttattggtagattttaaaaggtaaattttttagtttgatgtgaattattttttgtgattttttttttttaatttattttgatatttttatatttttatggggaaaagttgttttattatatagttaattggtggattaggtaatttatgggagtgttgaaagttgaaattttaggttgggtttgtggtaaaatttttaattttatttttagttaatagaatgttataatgagggaaaatatttagtaagttgaaaatatagaataaggaagtggaaagaaattttagtgataatgttattaagtggaaagaaggaaagtggtttattttttaggaaaataaatattgatttttttatagttatattttaagtgtattggttaaggtatgttttgttttgaaaaattattagaggttatagtgtggttttttttggttatgtatagtgagtttgttattatagtgtttttagagggtatatgattttatttttttatttaattttttatttgtgttttttttttgggtttttgtggtatttatatagtagtttttgttttgttgttttttggatttttagtttttattatatttggtggtttttaggaagtttgaataaattttgatgtgattaaaggagaggaaagtttgtttgttattttgggtggattagagataatatttttaggggatagggtgttatatggtagtttaaggtgtagtgatatttgagtttgatataattaatattagttttgttaggtggttttttgatgtttatttttttattaaataagatttatatttgtttaataagattttgggataattttaatttttgttttttagtaaggtgtgtggttggttagttggggtgggaagttggttttgtgttaaggatttgtagttttagtagtagtagattaggtagaagtgtttttttatttttattttaagtttttttagaaattgttgttagagtagatataaggttttggttggggtattattttttgggtgggtggggaggggagaagagataattaaaagttagttgaattgagaaaggaatttggtgaatttttttattttgtttaatagttaaagatttttttatttttaatttagtttttttgatttttaaattagttattatggaagtttattgttgttttttaatttaatgtggaaaattttattgttggggattttaaataggtgtttagtaagttgtgtgttggattggggtggttggttttggtaatatttggtaatttttgggtgtttttaggtgtgtggttgttggtttattttttgagggtgtttggaggtgaagtatttaagtgggtttttgtatttagtgggtgggattttggtgggttttgtgtgaagatttgggttttggtttgagtgaatggtgtttaaattttggtttggggagaatgatggtttgaattgtggtggggtgttttttttattgtagaaagtgtgggtatgtagaaatttgtggtaggagagttttaagtggagtgtagtttgatagtgtttgtttttgaatttgtgttggattgaggggatgttatttagtgggtagggtgatgttattgtttttttgatattttatattaaagggttggtatgttatagggagggagggggagagtgaaagttagtgtgagtaatagagagatttttttttagtaggtatgaaagt

SEQ ID NO: 59 - DNA, 1900 bp, Artificial Sequence
  chemically treated genomic DNA (Homo sapiens)
gtttttgtgtttgttgagaaaggatttttttgttgtttgtgttggtttttgttttttttttttttttttgtaatatgttagttttttaatgtggagtgttagggagatggtgatgttattttgtttgttgggtggtgtttttttggtttgatatgagtttagagatagatgttgttagattgtgttttatttggggtttttttgttgtgggtttttgtgtatttatattttttgtggtggaggggatgttttgttgtaatttaggttgttattttttttaggttggggtttgagtgttatttgtttgggttagagtttggatttttgtgtggagtttgttagagttttgtttgttggatatgaggatttgtttggatgttttgtttttgagtgtttttggaagatgggttggtagttatatgtttaaagatatttagaggttattaggtattgttggaattggttgttttaatttggtatatagtttgttgggtatttatttgagatttttagtggtaggattttttgtgttaggttgaggggtagtggtgggtttttgtggtgattggtttgggagttgggagaattaagttgggggtgggggggtttttggttgttgggtaggatagggaagtttattaggttttttttttagtttaattaatttttaattgtttttttttttttttttatttatttaaaaaataatgttttaattaaaattttgtgtttgttttgatggtagtttttgggagggtttggggtaaaagtgaggagatatttttgtttggtttattgttgttaaggttgtgagtttttaatgtagagttagttttttgttttggttggttagttgtgtgttttgttggggagtgagagttggaattattttagggttttattaagtggatatgaattttgtttggtagggaaatgagtattgaagggttatttgatgaagttagtgttggttgtattagatttgggtgttattgtgttttgaattgttatgtaatgttttgttttttggaaatattgtttttgatttatttaaagtgataagtaggttttttttttttttgattgtgttgaggtttgtttaagttttttggaggttgttaaatgtaatgagaattgaggatttagggggtagtaggatagaggttgttgtatagatgttataggggtttagagagaggatatggataagaaattgggtgagggagtaagattgtgtattttttgaaagtattgtaatagtgaatttgttgtatgtggttgaaaggggttatgttatggtttttggtgattttttagggtaaagtatgttttggttaatgtgtttgagatgtagttgtggaaagattagtgtttgtttttttagggagtgagttattttttttttttttatttagtggtattgttattaaaatttttttttgtttttttgttttgtatttttaatttattgaatatttttttttattgtggtattttgttgattggaggtgaagttagaaattttattatagatttaatttgggattttgatttttaatatttttatagattatttagtttattgattggttgtatggtggggtagtttttttttataaagatatagagatattaaaataaattaggggaaaagagttatagaaggtggtttatattaagttaaaaaatttgttttttgaagtttgttaatgaagatttttaagaattgtttatttttgtgtattgtttttgggtttaatatttttgtttttatttatttttttattgttatggaaatgatagtaaaatagtttttaaatgattattatttttaattttatgtttttaagttatttaattatttgagattagaattatttagtttagtaagtaggttttt

SEQ ID NO: 60 - DNA, 1002 bp, Artificial Sequence
  chemically treated genomic DNA (Homo sapiens)
ttattatatagttaattggtggattaggtaatttatgggagtgttgaaagttgaaattttaggttgggtttgtggtaaaatttttaattttatttttagttaatagaatgttataatgagggaaaatatttagtaagttgaaaatatagaataaggaagtggaaagaaattttagtgataatgttattaagtggaaagaaggaaagtggtttattttttaggaaaataaatattgatttttttatagttatattttaagtgtattggttaaggtatgttttgttttgaaaaattattagaggttatagtgtggttttttttggttatgtatagtgagtttgttattatagtgtttttagagggtatatgattttatttttttatttaattttttatttgtgttttttttttgggtttttgtggtatttatatagtagtttttgttttgttgttttttggatttttagtttttattatatttggtggtttttaggaagtttgaataaattttgatgtgattaaaggagaggaaagtttgtttgttattttgggtggattagagataatatttttaggggatagggtgttatatggtagtttaaggtgtagtgatatttgagtttgatataattaatattagttttgttaggtggttttttgatgtttatttttttattaaataagatttatatttgtttaataagattttgggataattttaatttttgttttttagtaaggtgtgtggttggttagttggggtgggaagttggttttgtgttaaggatttgtagttttagtagtagtagattaggtagaagtgtttttttatttttattttaagtttttttagaaattgttgttagagtagatataaggttttggttggggtattattttttgggtgggtggggaggggagaagagataattaaaagttagttgaattgagaaaggaatttggtgaatttttttattttgtttaatagttaaagattttttt

SEQ ID NO: 61 - DNA, 1002 bp, Artificial Sequence
  chemically treated genomic DNA (Homo sapiens)
gggggggtttttggttgttgggtaggatagggaagtttattaggttttttttttagtttaattaatttttaattgtttttttttttttttttatttatttaaaaaataatgttttaattaaaattttgtgtttgttttgatggtagtttttgggagggtttggggtaaaagtgaggagatatttttgtttggtttattgttgttaaggttgtgagtttttaatgtagagttagttttttgttttggttggttagttgtgtgttttgttggggagtgagagttggaattattttagggttttattaagtggatatgaattttgtttggtagggaaatgagtattgaagggttatttgatgaagttagtgttggttgtattagatttgggtgttattgtgttttgaattgttatgtaatgttttgttttttggaaatattgtttttgatttatttaaagtgataagtaggttttttttttttttgattgtgttgaggtttgtttaagttttttggaggttgttaaatgtaatgagaattgaggatttagggggtagtaggatagaggttgttgtatagatgttataggggtttagagagaggatatggataagaaattgggtgagggagtaagattgtgtattttttgaaagtattgtaatagtgaatttgttgtatgtggttgaaaggggttatgttatggtttttggtgattttttagggtaaagtatgttttggttaatgtgtttgagatgtagttgtggaaagattagtgtttgtttttttagggagtgagttattttttttttttttatttagtggtattgttattaaaatttttttttgtttttttgttttgtatttttaatttattgaatatttttttttattgtggtattttgttgattggaggtgaagttagaaattttattatagatttaatttgggattttgatttttaatatttttatagattatttagtttattgattggttgtatggtgg

SEQ ID NO: 62 - DNA, 276 bp, Artificial Sequence
  chemically treated genomic DNA (Homo sapiens)
tatatgattttatttttttatttaattttttatttgtgttttttttttgggtttttgtggtatttatatagtagtttttgttttgttgttttttggatttttagtttttattatatttggtggtttttaggaagtttgaataaattttgatgtgattaaaggagaggaaagtttgtttgttattttgggtggattagagataatatttttaggggatagggtgttatatggtagtttaaggtgtagtgatatttgagtttgatataattaatatta

SEQ ID NO: 63 - DNA, 276 bp, Artificial Sequence
  chemically treated genomic DNA (Homo sapiens)
tagtgttggttgtattagatttgggtgttattgtgttttgaattgttatgtaatgttttgttttttggaaatattgtttttgatttatttaaagtgataagtaggttttttttttttttgattgtgttgaggtttgtttaagttttttggaggttgttaaatgtaatgagaattgaggatttagggggtagtaggatagaggttgttgtatagatgttataggggtttagagagaggatatggataagaaattgggtgagggagtaagattgtgta

SEQ ID NO: 64 - DNA, 3100 bp, Artificial Sequence
  chemically treated genomic DNA (Homo sapiens)
tgttttttttagaggagaaaagatttggtttatgttttttagaggttttatttggtgaagaggaggagtagttattgtagtgtggtggatagggtgttttggttggtgttgaagatgttagtgatagtggttggtatgttttttaaatttagttgtgtgttattattgtgtgagtttttggttgtttttttttttgtagagaggataaaggtgtttattatgttgtggggggtggttttgggttgaaggtttttgtagtgttttaagaatttgtttaggatgaagttgttgaagttgtggttgagttgtttgaatttgtggaaaatggtgtgtattgggttggggaagtattgtagttagggtattatgtttattaggttgtttgtgtttattgtgtgtttgaattttttgttgtggttgagtagtttatggaatttggggttgttgtggttgtagtggtagttgaaatatatggtatttatgatgttggttatggttatgatggttagtggttttgggttgaggaaggtgttgtttgtgttgttgtgtattagtagtgttattagtttgtgtgttttgtttagtatgtggtttttgaggatttggtggttgtgtggttggtgtgtgaagaagttgtgtattatgttgtgggttgtgtgttgttgtattttttagtgttttgagtagtggttgaaagttatgttgtggttgttggatattatatggaaggaggtgaaggttggttggttggtgaaggttgagttttgttgtattagggtttggtggatggtgtgtttgttatttagtattattatggggtagttgtttaggtggatttggaaaatgttgttgtagtgttgtgttaggtgagtgaatgagaggtgagttgtttggtttattgttgttgtgtttttgattagtggttatgtaaatgggtttgggggtgtggattggagttgttgtttttgttgttttagtagttgttggtttatatgtatagtggttagtattgataggagtagtaggagtgtggtttgttggatggatagtgggtttagtggttaagggttgtttgggttgaggttggtgtttatgttggggatagagaggagaaggtgtgatatttaggggtgtagagataggagtgggtgttttatgtttttattttagtttttggggattgagtgttgttgggtggagaggttggagttgattttttggagaaatggttgaagatgtttttttttatttttaatttatttttttttggagaagagaaggggtgtgtttttattttgttgtaatttagtgttaaattttttttttttttgtaaggtgtgtaatggtttttgtaatttggggataatgttgtgggtattgaggtggtggtgtttgattttttttaaagtatttattatgttatttgttatttgtaataatttatttgaagaggttgttgggtagtgttttggtagatagattgatttgtggggaggtgtggtttttagtggtgtgggatagttggttttgagaaggaattgggatttttgtttagggtaagatgttaataggaatttgtagtttggtttggatatttgttgtttttattggaagttttaatttttatttgagttttttggtgttgttagtgttaggagtgtttggattgggatggggatggagaagggtgttttgtttgttgagttttgttgtttttggggatttggtaaagttgaggtttttttatagtgttgagattgagattgggggttggtgagtggtgttaatttttatgtttttgtggtttttataattggagttgtagaagtgtttgtttttatttttattttagagttaaagtgtgttattttgtttttttgggttttaaggattgggtagaaggagggtagtgtgatttggtagggtggggtttgtggggggtggggtgtgttgtatattaggttgttttgatttggatttttgtttaggtgtattggttggttttggagttttattagtaggtttttatgggagtggaggtgtttatgtttttattgtgtggtaattgtgttttattatagttatttttaattgaggttgtatggtgtttttagaattatgtttggtataatttgttttggttgttgtgtttgatttgggagtgtgttttgttttgagtgtatgattttttttttttttttgtgatttgagtttgttttttggaaagttagtgtagtggtagtggtttgttttatagtgtttttggttggttgtttaaattttattttaggtttttgtaaataaattgttattttagtggaggttttttggtatgttaaattttttttagtttttgtggtgagattaggaatttttaaaagtagttgtttttttgttttggggttttgatagtgtttgggtatataaaggtttttggggtgtagttggttttgagattttttgtgtagaggttattttaggtggtgttgtttgttggtgggtgtggggttgtttaggttgtgatggaagttgttggtgtagggtggggagttaagttggggtgattgggggggtttgggggagttagtggggtgggatttgagtggggtggagagtggtaggaggaggtgaatttttgtgttttggtgaattttattgggttgaagtttttgttgttgttttttttttgtgtgtggagttgggttttgtgtgtgttgtttttggaaagttggttttagttatatttttgggtgttgtttgtggttgttttttttgtgttttttatggtatttgatatgtggaggtggtggttgagggtggggtgttggttattattatttttggtgtggggtgttggttgttattatttttggttgtgtatgtatagttgtgtttgttaggttagtgaggtggatgtttgggttattatttgtaggttgagtttgggtgtgtattgttattttgttgtgtattggtggttttgtggtttttttgggtgtgtttgtggttgtgaagggggttttttttttataagggaagttggaggtgtttgggtgggggtggttttttttgtttggtgtgtttttttttatatgttgat

SEQ ID NO: 65 - DNA, 3100 bp, Artificial Sequence
  chemically treated genomic DNA (Homo sapiens)
attagtatgtaggaaagggtgtgttaggtgggggaagttatttttgtttaagtgtttttggttttttttataaagggagggttttttttgtgattgtaagtgtgtttaggaagattatagagttgttggtgtgtagtgaggtggtgatatgtgtttgggtttggtttgtgggtggtggtttaagtgtttgttttgttggtttggtaggtgtgattgtgtgtgtgtagttgagggtggtggtggttggtattttatgttaagggtggtggtggttggtattttatttttggttgttgtttttgtgtgttaggtgttgtgagaagtgtgggaggagtggttgtaggtagtgtttagggatatgattggagttgattttttagaagtggtgtatgtaaagtttagttttgtatgtaaaggggaggtgatagtagaaattttaatttgataaagtttgttggagtgtggagatttgtttttttttgttattttttgttttgtttgggttttgttttgttagtttttttaggtttttttagttgttttagtttggttttttgttttgtgttaatggtttttattgtagtttgggtggttttgtgtttattagtgggtggtgttatttggagtggtttttatgtgggaaattttagggttagttgtgttttaggagtttttgtgtgtttaagtattgttggggttttggggtgggggagtggttatttttagggatttttgattttgttgtaagaattggaaaaaatttagtatgttaaagagtttttattgaggtggtaatttgtttgtgagaatttaagataaaatttaaataattaattaggggtgttgtgaggtaaattgttgttattatattggttttttgggaagtaagtttaagttgtggagagggaagggaggttgtgtgtttggggtggggtgtgtttttaagttgagtgtagtggttggggtaggttgtattgagtgtggttttggggatattgtgtggttttgattggaggtggttgtgatgaagtgtggttattgtataatggaaatgtgggtatttttgtttttatgaaagtttgttggtagagttttgaggttggttggtgtgtttggatgggagtttgggttaaagtggtttggtgtgtggtgtgttttgttttttgtaggttttgttttgttaggttgtgttgttttttttttatttagtttttaaaatttggaggagtgggatggtgtgttttgattttggagtgggagtgggagtgagtgtttttgtgattttagttgtgagagttgtaagggtatgggaattgatgttatttattgatttttagttttaattttaatgttgtgaggaaattttgattttgttaggtttttaagggtagtggggtttggtgagtgaggtatttttttttgtttttattttaatttaagtgtttttggtattgatgatgttaagagatttgagtgggagttaaagtttttagtgagggtagtaggtgtttaggttgggttgtgggtttttgttgatgttttgttttaggtaaaggttttagtttttttttggagttggttgttttgtgttattggaaattgtatttttttgtaggttagtttgtttgttgaggtgttgtttggtgatttttttagatggattattataggtagtgggtggtgtggtaggtattttaaaggaaattaagtgttattgttttgatgtttgtagtgttgtttttagattgtaggaattgttatgtgttttgtggggaggggaagggtttggtgttgggttatagtgaggtggaaatatgtttttttttttttttaagggagagtgggttggggatgggaaggggtgtttttggttatttttttagagagttagttttgatttttttatttaatggtatttagtttttagaggttggggtaggggtgtggggtgtttgtttttgtttttgtatttttgagtgttatgtttttttttttttgtttttagtatgggtattagttttagtttgaatgatttttggttgttaaatttgttgtttatttagtagattatgtttttgttatttttgttggtgttggttattgtgtatgtgggttagtggttgttgaggtaatggaggtggtagttttggtttgtgtttttgggtttgtttgtgtggttattgattggaaatgtggtggtggtgggttaggtggtttattttttgtttgtttgtttggtgtggtgttatggtgatgttttttagatttgtttgggtagttgttttatagtggtgttgaatggtgagtgtgttatttattaggttttggtgtagtagggtttggtttttgttgattggttggtttttgtttttttttgtgtggtgtttggtggttgtagtatggtttttggttattatttggagtattggaaggtgtagtggtgtgtagtttatagtatgatgtgtaatttttttatgtgttagttgtgtagttgttaagtttttgagggttatgtgttgagtgaggtgtgtgagttggtggtgttgttggtgtgtggtagtgtggatggtgttttttttgatttgaggttgttgattgttgtggttgtggttaatgttatgagtgttgtgtgttttggttgttgttatagttatgatgattttgagttttgtgagttgtttagttataatgaagagtttgggtgtatggtgggtgtgggtagtttggtggatgtgatgttttggttgtagtatttttttaatttggtgtgtattgttttttgtgaatttgagtagtttaattgtaattttagtaattttattttggataagtttttgaggtattgtgaaagtttttggtttggggttgttttttgtgatatgatggatgtttttattttttttgtggaaaagaaggtggttggggatttgtatggtggtggtgtgtggttggatttggagaatgtattggttattattattgatatttttggtgttagttaggatattttgtttattgtgttgtagtggttgttttttttttttattaggtaaagtttttgggaggtgtgggttaggtttttttttttttgaaaaaggtg

SEQ ID NO: 66 - DNA, 2500 bp, Artificial Sequence
  chemically treated genomic DNA (Homo sapiens)
ttgagttgtttgaatttgtggaaaatggtgtgtattgggttggggaagtattgtagttagggtattatgtttattaggttgtttgtgtttattgtgtgtttgaattttttgttgtggttgagtagtttatggaatttggggttgttgtggttgtagtggtagttgaaatatatggtatttatgatgttggttatggttatgatggttagtggttttgggttgaggaaggtgttgtttgtgttgttgtgtattagtagtgttattagtttgtgtgttttgtttagtatgtggtttttgaggatttggtggttgtgtggttggtgtgtgaagaagttgtgtattatgttgtgggttgtgtgttgttgtattttttagtgttttgagtagtggttgaaagttatgttgtggttgttggatattatatggaaggaggtgaaggttggttggttggtgaaggttgagttttgttgtattagggtttggtggatggtgtgtttgttatttagtattattatggggtagttgtttaggtggatttggaaaatgttgttgtagtgttgtgttaggtgagtgaatgagaggtgagttgtttggtttattgttgttgtgtttttgattagtggttatgtaaatgggtttgggggtgtggattggagttgttgtttttgttgttttagtagttgttggtttatatgtatagtggttagtattgataggagtagtaggagtgtggtttgttggatggatagtgggtttagtggttaagggttgtttgggttgaggttggtgtttatgttggggatagagaggagaaggtgtgatatttaggggtgtagagataggagtgggtgttttatgtttttattttagtttttggggattgagtgttgttgggtggagaggttggagttgattttttggagaaatggttgaagatgtttttttttatttttaatttatttttttttggagaagagaaggggtgtgtttttattttgttgtaatttagtgttaaattttttttttttttgtaaggtgtgtaatggtttttgtaatttggggataatgttgtgggtattgaggtggtggtgtttgattttttttaaagtatttattatgttatttgttatttgtaataatttatttgaagaggttgttgggtagtgttttggtagatagattgatttgtggggaggtgtggtttttagtggtgtgggatagttggttttgagaaggaattgggatttttgtttagggtaagatgttaataggaatttgtagtttggtttggatatttgttgtttttattggaagttttaatttttatttgagttttttggtgttgttagtgttaggagtgtttggattgggatggggatggagaagggtgttttgtttgttgagttttgttgtttttggggatttggtaaagttgaggtttttttatagtgttgagattgagattgggggttggtgagtggtgttaatttttatgtttttgtggtttttataattggagttgtagaagtgtttgtttttatttttattttagagttaaagtgtgttattttgtttttttgggttttaaggattgggtagaaggagggtagtgtgatttggtagggtggggtttgtggggggtggggtgtgttgtatattaggttgttttgatttggatttttgtttaggtgtattggttggttttggagttttattagtaggtttttatgggagtggaggtgtttatgtttttattgtgtggtaattgtgttttattatagttatttttaattgaggttgtatggtgtttttagaattatgtttggtataatttgttttggttgttgtgtttgatttgggagtgtgttttgttttgagtgtatgattttttttttttttttgtgatttgagtttgttttttggaaagttagtgtagtggtagtggtttgttttatagtgtttttggttggttgtttaaattttattttaggtttttgtaaataaattgttattttagtggaggttttttggtatgttaaattttttttagtttttgtggtgagattaggaatttttaaaagtagttgtttttttgttttggggttttgatagtgtttgggtatataaaggtttttggggtgtagttggttttgagattttttgtgtagaggttattttaggtggtgttgtttgttggtgggtgtggggttgtttaggttgtgatggaagttgttggtgtagggtggggagttaagttggggtgattgggggggtttgggggagttagtggggtgggatttgagtggggtggagagtggtaggaggaggtgaatttttgtgttttggtgaattttattgggttgaagtttttgttgttgttttttttttgtgtgtggagttgggttttgtgtgtgttgtttttggaaagttggttttagttatatttttgggtgttgtttgtggttgttttttttgtgttttttatggtatttgatatgtg

SEQ ID NO: 67 - DNA, 2500 bp, Artificial Sequence
  chemically treated genomic DNA (Homo sapiens)
tgtgtgttaggtgttgtgagaagtgtgggaggagtggttgtaggtagtgtttagggatatgattggagttgattttttagaagtggtgtatgtaaagtttagttttgtatgtaaaggggaggtgatagtagaaattttaatttgataaagtttgttggagtgtggagatttgtttttttttgttattttttgttttgtttgggttttgttttgttagtttttttaggtttttttagttgttttagtttggttttttgttttgtgttaatggtttttattgtagtttgggtggttttgtgtttattagtgggtggtgttatttggagtggtttttatgtgggaaattttagggttagttgtgttttaggagtttttgtgtgtttaagtattgttggggttttggggtgggggagtggttatttttagggatttttgattttgttgtaagaattggaaaaaatttagtatgttaaagagtttttattgaggtggtaatttgtttgtgagaatttaagataaaatttaaataattaattaggggtgttgtgaggtaaattgttgttattatattggttttttgggaagtaagtttaagttgtggagagggaagggaggttgtgtgtttggggtggggtgtgtttttaagttgagtgtagtggttggggtaggttgtattgagtgtggttttggggatattgtgtggttttgattggaggtggttgtgatgaagtgtggttattgtataatggaaatgtgggtatttttgtttttatgaaagtttgttggtagagttttgaggttggttggtgtgtttggatgggagtttgggttaaagtggtttggtgtgtggtgtgttttgttttttgtaggttttgttttgttaggttgtgttgttttttttttatttagtttttaaaatttggaggagtgggatggtgtgttttgattttggagtgggagtgggagtgagtgtttttgtgattttagttgtgagagttgtaagggtatgggaattgatgttatttattgatttttagttttaattttaatgttgtgaggaaattttgattttgttaggtttttaagggtagtggggtttggtgagtgaggtatttttttttgtttttattttaatttaagtgtttttggtattgatgatgttaagagatttgagtgggagttaaagtttttagtgagggtagtaggtgtttaggttgggttgtgggtttttgttgatgttttgttttaggtaaaggttttagtttttttttggagttggttgttttgtgttattggaaattgtatttttttgtaggttagtttgtttgttgaggtgttgtttggtgatttttttagatggattattataggtagtgggtggtgtggtaggtattttaaaggaaattaagtgttattgttttgatgtttgtagtgttgtttttagattgtaggaattgttatgtgttttgtggggaggggaagggtttggtgttgggttatagtgaggtggaaatatgtttttttttttttttaagggagagtgggttggggatgggaaggggtgtttttggttatttttttagagagttagttttgatttttttatttaatggtatttagtttttagaggttggggtaggggtgtggggtgtttgtttttgtttttgtatttttgagtgttatgtttttttttttttgtttttagtatgggtattagttttagtttgaatgatttttggttgttaaatttgttgtttatttagtagattatgtttttgttatttttgttggtgttggttattgtgtatgtgggttagtggttgttgaggtaatggaggtggtagttttggtttgtgtttttgggtttgtttgtgtggttattgattggaaatgtggtggtggtgggttaggtggtttattttttgtttgtttgtttggtgtggtgttatggtgatgttttttagatttgtttgggtagttgttttatagtggtgttgaatggtgagtgtgttatttattaggttttggtgtagtagggtttggtttttgttgattggttggtttttgtttttttttgtgtggtgtttggtggttgtagtatggtttttggttattatttggagtattggaaggtgtagtggtgtgtagtttatagtatgatgtgtaatttttttatgtgttagttgtgtagttgttaagtttttgagggttatgtgttgagtgaggtgtgtgagttggtggtgttgttggtgtgtggtagtgtggatggtgttttttttgatttgaggttgttgattgttgtggttgtggttaatgttatgagtgttgtgtgttttggttgttgttatagttatgatgattttgagttttgtgagttgtttagttataatgaagagtttgggtgtatggtgggtgtgggtagtttggtggatgtgatgttttggttgtagtatttttttaatttggtgtgtattgttttttgtgaatttgagtagtttaa

SEQ ID NO: 68 - DNA, 216 bp, Artificial Sequence
  chemically treated genomic DNA (Homo sapiens)
tatgttttttaaatttagttgtgtgttattattgtgtgagtttttggttgtttttttttttgtagagaggataaaggtgtttattatgttgtggggggtggttttgggttgaaggtttttgtagtgttttaagaatttgtttaggatgaagttgttgaagttgtggttgagttgtttgaatttgtggaaaatggtgtgtattgggttggggaagta

SEQ ID NO: 69 - DNA, 216 bp, Artificial Sequence
  chemically treated genomic DNA (Homo sapiens)
tatttttttaatttggtgtgtattgttttttgtgaatttgagtagtttaattgtaattttagtaattttattttggataagtttttgaggtattgtgaaagtttttggtttggggttgttttttgtgatatgatggatgtttttattttttttgtggaaaagaaggtggttggggatttgtatggtggtggtgtgtggttggatttggagaatgta

SEQ ID NO: 70 - DNA, 9100 bp, Artificial Sequence
  chemically treated genomic DNA (Homo sapiens)
atttataattttagaagtttttttaagaggaaaaaaaaggtgttatgtgtttgttgtttaatagatttaaatattttattatttttattattgttattattatttttattgaatatttttattataagataggtagatatgtgatatgtggtgaaggttttattttatttattattaatttttataagtatttttattttagggtgttttggggagggtagaggaggaatatttgggtttaaaagttgtttttggattatttttagattagtttggtggaaatggtagtgtgagtgttatgttatttgagattgtgtttgaaaattttttttatgtttttaaattaaagttattttgaggtttaagaatgataattataggtgaatgttttattttttttatgagttaggttttttttttgtatgatgtagattggtggttgagatttgttttgaggttttgttttttatttggtttatgtggttttgtgtagtttatgtagttttttttgtttttaggtaattagtttgtgggaaatttattttagaaaagtgtgtgttatattattattttgtgatttaataaatttttttaattgttgtttaggaattagattttagatagattttgttgtgtttggtttttttagaaattttttttttagaggaagaagatttgggttgggaagagtgtgtgattatggttttgggtttattgaaagatttttttttataaaagtttagggttgatattaaatgaagttatggagttatgtttatataaatattttttttttatttgaattgtggggtttggattgtgaaggtttttgttgtaagagtgggtattggtgaattttagtgtatgttgtggttgagaatggatgtagggtgggggatggttgagttgtttgatttttgtagagaatttgtaggggtttttggagggtattttttgtgtttaagggagtgttttttttttttagtatttgggggaattgagggtgatgtgttagttttgtatttaattttttttttttttgtaggtatagagttggttggtgggggtagaggaggagttgggtttttattgtgtttgtttaaatttggttaggggttgtgttttttttttttattttatgatgatttttttttagtttttgttttttaatttaattgttaattatttggaatgtgtgggtggggagtggtgaggagggtgagtttggggtttgttgttgttgttgttgttgtgtgtgtgtgtttaggaagtggtgtggttgttatttttttttgggttttttttttttttttttttgttttgtttttttttttttttttttttttttttgttttgttgtttgtgtttagtgtatttattttttttttatgttatttgttagtgtgttatgtaaattattgttgttgttggtttttattggttgtggtgtgtttatttaatggtagtttgggtttggtgtatggttgttgggttttgtgtgttgttggttttgtgtgtgtttttgttttgagtgtatggttttgggtaggtagtgggtagtttattttgggtttggtggttttggttttttggttttttttgtgagtttgtgttttttttgttgtttttgggtttttttttggttgtattgtaattgttttttgtaggtttttttgtgtttttttttttttgttattggtgtttggttttttttgggtatttgggattagtatatgtttagtgtatgtggtgtgttgttttgttagaagttgtagtttttgagttggaggttgttgaggattgagtgtaggaggaaggagatagtgtgtagtggtggttggtgaggagatagtatattttgggttgggtttagtgtattgtttttggttttaaaagtggagttgtaatttggttatgattgtatttgtttgtattgttttgttgagggtgtttgggttgtggtggtggtgaagatggtgattttgattgttggtttttttggtaagtggtttgtgtattaggagaaattttttatttgtgagttgaattggtgttgagtgtgtgtgtttttgtttttttttgttgttgttgtttttatttttttttatttttttttttgttaggatttttttgtttttgttttattttgtttgaatttttttttgttttttttttattttggttgtttatgttttaggttttttttttgtggtgttggtgaatttgttagttgttttgatgtatagtatgatgatggagattgatttgtatttgtttggtggtgtttaggtttttatgaattttttgggttttgttggggtgggtggtggtgggggtggaggtgggggtggtggtggtggtgggggtgttaaggttaattaggattgggttaaatggtttatgaatgtttttatggtgtggttttgtgggtagtggtgtaagatggtttaggagaattttaagatgtataatttggagattagtaagtgtttgggggttgagtggaaggttatgtttgaggttgagaagtggttgtttattgatgaggttaagtggttgtgtgtgttgtatatgaaggagtatttggattataagtattggttgtgttgtaagattaagatgttgtttaagaaggataagtatttgttggttggtgggtttttggtggttggtgtgggtggtggtggtgtggttgtggttatgggtgtgggtgtgggtgtgggtgtggtggttgtgggttagtgtttggagagtttaggtggtgtggtgggtggtggttatgtgtatgttaatggttgggttaatggtgtttattttggtttggtggtggtggtggtggtggttgtggttatgatgtaggaggtgtagttggtttatgggtagtatttgggtgtgggtggtgtgtatttgtatgtgtattttgtgtatttgtatttgtattatttgtatgtgtatttgtataatttgtagtttatgtattgttatgatatgggtgtgttgtagtatagttttatttttaatttgtagggttatatgagtgtgttgtttttgggttatggtggttttttttatggtgttgtggttgttgttgttgttgttgtgggtggtgtgtattagaatttggttgtggtggtggtggtggtggtggtggttgtgttgttgggtgttttgggtgtgttgggttttttggtgaagttggagtttagtggtagtttgtttgttttagtgtatttgtgggtgttgtgttttggggatttgtgtgagatgattagtatgtatttgtttgttggtgaggggggtgatttggtggtggtagtagtggttgtggtgtagagttggttgtatttgttgttgtagtattattagggtgtgggtgtgggtgtgaatggtatggtgtttttgatgtatatttagtgtttttgggatgttggggattttgtggtggtgatttatgagtttgtggtttgtgtttggtttttgttttgttttggtgtggtgtggtttttgtatagatgtttttatatttttgttaaaaggaaaatattggagatgaatgttgggtgatgtgtgttttttatttattttttttggagattttggtgattgttgggtgttgatattagatttgggttttagattgaattttggtgtttttttgagattttttgtatagtatttattatttatggaggaagtggaaagtgttttttttgtttgaggggataaaaaagttaaaatgaggtgagaggtgaagtttatttttgtatattggttggtgtgtttatttttttttgtgttgtttttggatggtgttgattgttggagtttaagtgatgtggagtttgttgtatttgttataaatgtagtaaggtaggtttaagtatttataagttttttgtagttgttattgtttttttgggttggtttgttaatttatataaagagattattattattatttttttttttagatggtggagttatattttgggttttgtaaaattttatgtatttgagtatttttatttttttttttgggttttgtattattttttgtaaatgtattgtgaaaaattttatttttggtgttgtaatgtggggaggagaagttagattatgtatatagttttttaaaaagttttttttttaaaaatgaaaaaagattttttatttaaaatgttttgagttaataaatttaagagatagagtttattttttttataaatttgtaatatgttatttttatgtgtatgttttatgagtttaaaatgtaatgaggaaatttgatagggaaattatttgtatgaattaaaagtaagggaattttggggaatgggaggataggattttttaaggaattttttttaatgaaagagaaggaagttaaaatttataggttattttgtagagttgagtgttaatatgggttgagaaataaaagtattttttgttttggttgttttattgtggatggttggggttgttgtgtgttattttgttgtaagtggggtgttttttatttggttgggggtttgtgttatagtttggtttagaggagggaggaggaagggaagattttagtggtgggattttggattaggttatggatgaaggataaagattagggtaggttatgggttttttaattttttagtaattaagattttgagtagaatttatttaaatgtgttttaaggaaatataattgttgaattaaaatgtattgtagttgagttttttttgtttattttttgtttttttttttggttttttttttttgggaaaatgggtaaaataattgtgttggatttttatatatatagaaatattgattattatttttttttgtgtgaattgggatgtaagttgttaattgatgtgaatgtaaaatgttttgtttattatttttgatgagattttgaggttgtttgatgttttaaattttttaattatattattttttaggtgtttattggtatattgtagttttttttttgaaatttaaaaatttttgtaaaattttgtttttaagtaatttgatagtattaaatattgtatttaaaaattatattgtagtaaatatatttaaaaattaattataatgttaagatgaaattatatttttggaaaaaaaaaatatttgaagtttagatggaaatatgtttattttagtagttttaggtttttttttgtttttttaatatttttttttgttttggagtatggattgtttgtttaaaagtgagtttatgttataagtttaatgagaattgaatttagtttgtatttgagaatagttttaagtataatgttgatttgataattgatgtgtaatttgggaagttattttgataattttgtttaaattatttatttgttaaagtgattataaaaaagtttaagaatgatgtttattgttttttaataagataataaatttttttttttttttttttttttttatttttattttttttagttatttgattttttttgaagtagttgtttttggaagagtttgtgtgtttatggatggttgagtattattatgatttagtttgggataagggtttttttagttttttttgggagatgatttgggaaattttataatgtttgttttgttaatttattgggattttgagggtttaatgggattttgagggttttttttgaaatatataaatttaaaggattttttttgaggttttttgattgatgtttatttttagtttggtttttgtgtttttttgtgtgtattttggagtttttgtgtttaattgttggtatttaggttttggtttaagattaggatgtgggttttattttagaggtatagattatgaaaagttgagttagtgtgtttgggatgttaggtaagtagtttttatagtttggtattttattgtaggtgttttgtgtatagttagttgaaatagttaatgttaggtgttttaattattttatttttttgttttgttgattagaataatatagaaaaaagtaaatataaatttttaatgattttatttaaaaatattatagggtgggggtaaggaaattagttgagatttattttaggattgagattttatttttttttttttgtttttagtagtgttgttttaatttaaattagtggagaaaagattatagtaggttttgagttgattgtgaatttggtgtttggttaaggtaatatttattgtatttatggagtgaaatattatatgatgatagttattatattatatgatgattttatttattttttaaattatagggtggtgtttttgttgtttagtttaattatgtttgtaatttgtgtagggaaggtggataggagtttttgaggtttagtgtaaagtttgtattagtttttgtgggggtgatagtgtgattttgtaaatttgttattgtgtttgggttttgttttttaaattgagggtaggagggtttatttgagggtttttttgttttgttttgttttgtttttgttttgttttgttttttaatttatttgttttttttgttgttgagattttgatgtttttttttttggagaaatttatttgtaatgtattagatggattagttttaaagaagatttgggtatagtgtgatttttagatgtgtgttgggagtgtgattgataggtttattaaaattatgtgtgtgggagaatggtatttatgtttttgtgttttatttttttggtaaagattgggtgttgtagatttttgtttttggaaaattttagttaatttaagaaatttatttttggatgtgtgtttgtttttttttgaaggtttgttttaggttagtttggattttagtgtttttttgattttgttgggttttggttgatttttgttttttttttatttatgtttggtttgggtttgggggtagtggttttagaggtgttggtggtagaatttaatttttggtttgagtttttggaaattttaagtgaaaagtagatttggttttggtgtggttttttttttagtgtgattatttggtgagattgaaaggttaggttagatggggaaaagtgagtggggtgtgggtttttagtatttggtggggtggggtggtgttaggatggagtgagggttggtgggggggtttgtgtggaggtttaggttgggaggtggggatgtagggattttttatttagttttttgtttttgtttgagttaggttttgggattatttttttttgtttgagggtgagttttttttttttttttttttttttgttttttttgttttttttttttttttttttttttttttttttggttttttttttttagttgtgtgtttgttgggattatgttttttttgtttttgggagttgagtggtgtttgtggttggtttggatgtgttttttttgggtgggggtggttgggtttttttggggttttgggttttttgggtgtatttttttgtttgtgtttttttaagttgttttttttttggttttgtttgtggttgagttttgtatattgtgttgttgtttttggggttttggtatatggtgttttttttttgtttttgttatttatttttattgtttttttagtttttgtgttgtttttattgttttttgatttttgtattgagttgtgtttttgttgttggttttttttagtgtggtttggttttttttttgtttttgaagtttttttgttgaggtttgtgtgtggtttttttttttgtttttttttggtttttgggtgtttagttggaggttggggtgggatggggtatgagttttggggtggtttgtgttttttttattagtttttttattgttttggttttgtttttgtagttttggggtgggagggtgtaggggtttttgggtgttttgggagtttattttttttaggtttgtgttggtgttagttgttggtggggggtgggtggagattaagatgagtgttgtgagggatggggttgagggttttgtgtagaaggagagtaggattagtggagagaaagtgttgatttggggttagttgtaagttaaatttttttatatttagttggtggaatgagtatggtttgggttggatggtaataagtgggtgtgaagggagggggaggggaggttgggtattggttgggtttggtgtgagagaggggagggggaggggatgtggttatagtgttttagggttttagtgttattggggatgggtgttgaggggagtgtgtattagtgatttgggtgtggattggggtttgtagggtgtgattggttgttttttaggattttattttttttataaatatttgttttttttattttttggggttgttttggttgtttttttggagggaagattggggagaaggttgtttgtgttttttgttttagaggttttgttttagaaattgttttttaatttttataagaaataaaaaaattataggaaggtttggttttttttttggatgattgtgtttttaggttttttaggaatttttgttttatttgagtttttttgtagttttggatttatttttggggggtgtgtgtgatgtagaattggggtataaaatattaatgttgtttgttatgatattgttttttttatttgggtagagttgtggtttttgggtgttgtgtgtggtgttttttattatggagggaaagttgtggttttgtgggaaaggagtgaaaattgagtgtgggtgaagaggagagggaggttagggggtaagggaagaaagtagataaatgtattttttttagtagttaagttggaaatttgtgttgaaagtataatagtaagagtttttatatgaaaaatatgtgaagaatttgagtaagtgatagatttaaagatggaaaatgattgtttattttgatagtaaaaataaaaagaatagaattgatatatttttgtttaaattattttttatttgttgatatgaaatattaatatttaaataaaaataaaggataaagtagtttttaaaaataatataaaataagtaattttgagtgaatgatttgtttatagtttattttgggtgatatgggggtgttgtgatggaaaatgggttttgggtttaaaatta

SEQ ID NO: 71 - DNA, 9100 bp, Artificial Sequence
  chemically treated genomic DNA (Homo sapiens)
tgattttgaatttagaatttattttttattatagtgtttttatgttatttagggtaagttgtggataggttatttatttagagttgtttgttttgtgttgtttttaaaaattgttttgttttttgtttttgtttgagtgttggtgttttatattggtagatgaaaagtaatttagatgaaaatatgttaattttgttttttttatttttattattaaaatagatgattattttttgtttttggatttattatttgtttgggttttttatgtgttttttatgtgaaaatttttgttgttgtatttttagtataaatttttagtttggttgttagggaagatgtatttatttgttttttttttttgttttttgattttttttttttttttatttatatttggtttttattttttttttgtggagttgtggttttttttttgtgatgaaaaatgttatgtgtaatgtttgggagttgtagttttgtttgggtggagaaagtggtgttgtgataaatagtattgatattttatattttgattttgtgttatatatgttttttagaaatagatttagggttgtgaagaagtttggataaggtgaagatttttggagagtttggggatgtagttgtttgggagaggaattaggtttttttgtgatttttttgttttttatggaaattaagaaatagtttttaaaatagagtttttggggtagagagtgtaggtaattttttttttagttttttttttagaggagtagttgaagtggttttggggaatggaaaaggtaggtgtttatgaaggagatggagttttggggggtagttagttatgttttgtaggttttagtttgtgtttgggttgttggtgtgtgttttttttggtgtttgtttttgatgatgttgaggttttggggtgttgtggttgtgttttttttttttttttttttttatgttggatttggttggtatttggttttttttttttttttttttgtgtttatttgttgttgtttggtttgagttgtgtttgttttgttggttgagtgtaaaagggtttgatttgtggttgattttgggttagtattttttttttattaattttgttttttttttatataaaatttttggttttgttttttgtagtatttattttaatttttatttgttttttgttggtggttgatattggtgtggatttgagggagatgggtttttagggtgtttggggatttttgtgtttttttgttttgaggttgtggggatggggttgaggtaatgaggggattagtagggggagtgtgggttgttttgagatttgtgttttattttgttttgatttttgattgggtgtttaagggttggagagggatggagaggggagttgtgtgtgggttttggtgggggagttttaaagataaagaggaggttgggttgtgttgagagaggttggtggtggagatgtagtttggtgtgggagttagagggtggtggagatggtatagggattggagaggtggtgggagtggatggtgggggtggggagggaatgttgtgtgttgggattttaaggatagtggtgtggtgtgtggggtttagttgtgggtagagttggagaaagggtgatttggagaggtgtaggtaggggggtgtgtttgggaggtttgaggttttgaggaggtttggttatttttgtttggaggggatatgtttggattagttgtagatgttgtttggtttttgggggtgggaggagtgtggttttggtgggtgtgtagttggagaggaagggttggggagggaggagggagagagggagggaagaatgggggaggtggggaggaagagggaggaggagagtttgtttttaggtaaggggaggtgattttgaggtttggtttgggtgggagtagaggattgggtgaggggtttttgtgtttttattttttggtttgggtttttatgtgagtttttttgttggtttttgttttgttttgatgttgttttattttgttggatattgggggtttgtattttgtttatttttttttatttggtttggttttttagttttgttagatagttatgttggaaagagagttgtgttaaggttaagtttgttttttatttgaagtttttaaggatttagattgggggttaaattttgttgttgatgtttttggagttgttgtttttgggtttaggttgagtgtgggtggggagggggtgggagttggttggagtttgatggggttgagggggtgttggagtttgggttggtttgaagtgagtttttgggggggggtgggtatatgtttggggatgggttttttgaattaattggaattttttggagatagaaatttgtggtgtttagtttttgttgggggaatgaaatgtgggagtatgagtgttgtttttttatatgtgtgattttaatagatttattagttatgtttttgatgtgtatttggagattatgttgtgtttgagttttttttaaaattaatttatttagtatgttatgggtgggtttttttggggaaggggatgttaaaattttaataataaaaggggtgggtgagttgaaaaataaaataaggtaaaaatagaataaaataaagtaaaaaaatttttaagtaaatttttttatttttagtttggagggtagggtttgagtgtaatggtagatttatgaagttatattgttgtttttgtagaaattgatgtaaattttgtattaggttttaaagatttttatttgttttttttatatgggttgtaaatataattggattaagtgatagaagtattattttgtgatttgggaagtgaatgaagttgttatataatataataattattattatatagtattttattttgtgaatatgatgagtgttattttggttaagtattgaatttatagttggtttagggtttattgtaattttttttttattaatttgaattggagtgatattgttgggggtggggaaggggggatagaattttaattttgagatgaattttagttaatttttttgtttttattttgtgatatttttaaatggagttattaaaaatttatatttgtttttttttgtgttgttttaattaataaaataaggaaataaggtggttggagtatttggtattggttattttagttgattgtgtatgaagtatttgtaataagatgttaaattgtaaaagttgtttgtttggtgttttgggtgtattaatttagttttttatagtttgtgtttttaaagtggggtttatattttaattttgagttaagatttagatgttaataattggatatagaaattttagggtatatataggggagtataggggttagattgagagtggatgttagttaaagaattttagagagagttttttaagtttgtatattttagagaaaatttttaaggttttattggatttttaaggttttggtgagttaatagaataagtattataaaattttttaaattattttttggagaggattggggaggtttttattttggattaagttgtagtggtgtttagttatttatgggtgtatagatttttttagaaataattgttttagaaaggattaaatagttaaaagaaataaaaataaagaaaaagaaaagagggggggggtttattattttgttagaaagtagtggatattatttttgaatttttttgtaattattttaatgaatgagtggtttaagtaaaattattaaaatgattttttaaattatatgttaattgttagattagtattatatttaaagttatttttgaatgtaggttgaatttggtttttattaaatttatagtataggtttatttttggatggatagtttatattttaggataaggaagggtgttgagaaagtgaggggaaatttaaggttgttgaaataaatgtatttttatttgggttttaagtgttttttttttttaaaaatataattttattttaatgttgtgattaatttttaaatgtatttgttatagtataatttttaaatgtaatatttaatgttgttagattatttgaagataaagttttatagaaatttttaaattttaaaaaaaaaattgtaatgtattaataaatatttagaaaataatataattaaaaaatttaaagtattaaataattttaagattttgttaggaataatgaataaggtattttgtgtttatattggttagtaatttgtattttagtttatgtgggggagggtgatggttgatatttttgtgtgtgtgagaatttagtataattattttgtttgtttttttaagagaaagaagttagggggaggggtagaggatggatggagggggtttggttgtagtatgttttggtttagtgattgtgtttttttgaaatatatttagataaattttgtttgaaattttaattgttggggaattgggaaatttgtgatttgttttggtttttgttttttatttatggtttggtttagggttttattattggggttttttttttttttttttttttttggattaaattgtggtgtagatttttagttaggtggaaggtgttttgtttgtagtaaggtaatgtgtagtagttttagttgtttgtagtgaaatagttggagtagaagatatttttattttttggtttgtattaatatttagttttataaaataatttataggttttaattttttttttttttattgaaaaaggttttttgaaaaattttgtttttttattttttggggtttttttatttttagtttatatagataatttttttgttagatttttttattgtattttgaatttataaaatatgtatataaaaatagtatgttataaatttatggagaaaatgggttttgttttttaaatttgttgatttgaaatattttgggtggggggtttttttttgtttttagaagaaaggttttttagaaaattatgtatataatttgattttttttttttgtattgtaatgttgaaaataaaattttttataatgtatttataagaaataatataaaatttaaaaaaaaaaatggaaatgtttagatatataaagttttataaaatttagaatataattttgttgtttgaaggagggggtggtggtggtaatttttttgtataaattaataaattaatttaaaagagtggtaataattataaaaaatttgtaagtgtttggatttgttttattatatttataataaatgtgatgagttttgtgttatttgggttttggtggttggtgttgtttggaagtaatgtggaggaaagtgagtgtgttggttggtatataaaagtgggttttgttttttgttttgttttgatttttttgtttttttgagtaaagaaaatgttttttgttttttttgtaggtgataaatattgtataaaaagttttaagaaaatattgaagtttagtttaaaatttaagtttggtgttagtgtttggtggttgttagggtttttggggaaggtgagtgggggatatgtgttatttggtgtttgtttttagtattttttttttgataagaatgtgggaatgtttgtataaaagttatgttgtgttggggtggggtgggagttgggtgtgggttgtgagtttgtgggttgttgttgtagagtttttggtgttttgaaggtgttagatgtgtgttaggggtattgtgttgtttatgtttgtgtttgtgttttggtagtgttgtggtagtgagtgtagttggttttgtgttgtggttgttgttgttgttgttgggttgttttttttgttggtgggtaagtatatgttgattattttgtgtaggtttttggggtatggtgtttgtgagtgtgttggggtgggtgggttgttgttgggttttgattttattagagagtttagtgtgtttagggtgtttgatgatgtggttgttgttgttgttgttgttgttatggttgagttttggtgtgtgttgtttgtagtggtggtggtggtggttgtggtgttgtaggggaggttgttgtagtttgagggtgatgtgtttatgtagttttgtgagttggagatggggttgtattgtagtgtgtttatgttgtagtggtgtatgggttgtgggttgtgtgggtgtgtgtgtgggtggtgtgggtgtgggtgtgtggggtgtgtgtgtgggtgtgtgttgtttgtgtttgggtgttgtttgtaggttagttgtgttttttgtattatggttgtggttgttgttgttgttgttattgagttggggtaggtgttgttggtttagttgttgatgtgtgtgtagttgttgtttgttgtgttgtttgggttttttaggtgttggtttatggttgttgtgtttatgtttatgtttatgtttatggttatagttgtgttgttgttatttgtgttggttgttaggagtttgttggttagtgagtatttgttttttttgagtagtgttttggttttgtggtgtggttggtatttgtaatttgggtgtttttttatgtgtagtgtgtgtagttgtttggttttgttgatgaatggttgttttttggttttggatatgattttttatttggtttttaggtgtttgttgatttttgagttgtgtattttggggtttttttgggttattttgtgttgttgtttgtgggattatattatgaaggtgtttatgggttgtttgatttggttttggttggttttggtgtttttgttgttgttgttgtttttgtttttgtttttgttgttgtttgttttggtggggtttgagaggtttgtgggggtttgggtgttgttgggtgagtgtaggttggtttttattattatgttgtatattggggtggttggtgggtttattggtattgtgaggagagggtttggagtatagatggttggggtgggagggagatggagaggaatttagatggagtgagatgggggtgggggggttttagtggagagaagaatggggaggggtggaggtaatgataataaaaaaaggtagaaatatatgtatttggtgttggtttggtttgtaggtggaaagttttttttgatgtataaattatttgttaaagaggttgatggttggggttgttgtttttgttgttattgtagtttaggtgtttttggtggagtggtgtaaataggtgtagttgtggttaagttgtagttttgtttttggggttgggagtggtgtgttgggtttggtttggggtgtgttgtttttttgttggttgttgttgtgtgttgtttttttttttttgtgtttggtttttagtggtttttaatttggaggttgtaatttttagtagggtggtgtgttgtgtgtgttgggtatgtgttggttttaggtgtttgggggaagttaggtgttagtggtggggggggggaggtgtaggggggtttgtagggggtgattatggtgtagttagggaggggtttggggatagtgggaggagtgtgggtttgtggagagggttggagagttggggttgttgagtttgggatgggttgtttgttgtttgtttggggttgtgtgtttggagtggaggtgtatgtggggttggtggtgtgtggggtttagtagttatatgttgggtttgggttgttattaaatgagtgtgttgtggttaatgggagttggtggtggtggtgatttgtatggtgtgttggtgagtgatgtggggagggagtagatatattgggtgtgggtggtggagtggggaggaggggaggaaggagggggagtaaagtaggaaggaggggggaggaggtttgggagggggtgatagttatattgttttttgagtgtgtgtgtgtggtggtggtggtggtggtgaattttgagtttgttttttttgttgttttttgtttgtgtgttttgaatgattaatgattgggttgaaaagtgaagattaagaaaggattgttgtggggtggggggaggaaatgtagtttttggttaggtttaaatgggtgtagtggagatttagttttttttttgtttttgttggttaattttgtgtttgtagggaaggggaaagttgagtgtggggttggtatgttgtttttagtttttttgagtgttgaaaaggaggggtgtttttttggatgtaggggatattttttgagggtttttgtaggttttttgtaaggattaggtggtttagttattttttgttttgtatttgtttttggttgtggtgtgtattgaagtttgttagtgtttgtttttgtagtgaaggtttttatagtttaggttttataatttgggtaaagggggagtatttgtgtgggtatggttttatagttttgtttagtattagttttaaatttttgtggggaggagttttttaatgagtttggggttatagttatgtattttttttaatttggattttttttttttggaaaaggaatttttaggaaggttgaatataataagatttatttggaatttagtttttgaataatagttgaaaaagtttgttgaattgtaaaataatgatatggtgtatgtttttttggagtgaattttttatgagttggttgtttaagaatggagaaaattgtgtgaattgtgtggggttatataaattgaatgaaaggtggggttttaggatgggttttagttgttggtttgtgttatgtaaaggaaaggtttggtttgtggaaagagtaaggtatttatttgtggttattatttttaaattttaaagtggttttgatttgggaatgtgaaagagatttttaaatgtagttttaagtagtatagtgtttatattattgtttttattagattgatttgaaagtggtttaaagatgatttttgagtttaagtattttttttttgttttttttgaggtattttgagatgagagtgtttgtggagattggtggtgggtaaagtagaatttttattgtatgttatatgtttgtttgttttgtagtaggaatatttagtaaagatgatgataatggtaataggagtaataggatgtttgagtttgttgggtagtgaatatgtgatattttttttttttttttaaaaaaatttttgaggttgtgaat

SEQ ID NO: 72 - DNA, 8500 bp, Artificial Sequence
  chemically treated genomic DNA (Homo sapiens)
gttatttgagattgtgtttgaaaattttttttatgtttttaaattaaagttattttgaggtttaagaatgataattataggtgaatgttttattttttttatgagttaggttttttttttgtatgatgtagattggtggttgagatttgttttgaggttttgttttttatttggtttatgtggttttgtgtagtttatgtagttttttttgtttttaggtaattagtttgtgggaaatttattttagaaaagtgtgtgttatattattattttgtgatttaataaatttttttaattgttgtttaggaattagattttagatagattttgttgtgtttggtttttttagaaattttttttttagaggaagaagatttgggttgggaagagtgtgtgattatggttttgggtttattgaaagatttttttttataaaagtttagggttgatattaaatgaagttatggagttatgtttatataaatattttttttttatttgaattgtggggtttggattgtgaaggtttttgttgtaagagtgggtattggtgaattttagtgtatgttgtggttgagaatggatgtagggtgggggatggttgagttgtttgatttttgtagagaatttgtaggggtttttggagggtattttttgtgtttaagggagtgttttttttttttagtatttgggggaattgagggtgatgtgttagttttgtatttaattttttttttttttgtaggtatagagttggttggtgggggtagaggaggagttgggtttttattgtgtttgtttaaatttggttaggggttgtgttttttttttttattttatgatgatttttttttagtttttgttttttaatttaattgttaattatttggaatgtgtgggtggggagtggtgaggagggtgagtttggggtttgttgttgttgttgttgttgtgtgtgtgtgtttaggaagtggtgtggttgttatttttttttgggttttttttttttttttttttgttttgtttttttttttttttttttttttttttgttttgttgtttgtgtttagtgtatttattttttttttatgttatttgttagtgtgttatgtaaattattgttgttgttggtttttattggttgtggtgtgtttatttaatggtagtttgggtttggtgtatggttgttgggttttgtgtgttgttggttttgtgtgtgtttttgttttgagtgtatggttttgggtaggtagtgggtagtttattttgggtttggtggttttggttttttggttttttttgtgagtttgtgttttttttgttgtttttgggtttttttttggttgtattgtaattgttttttgtaggtttttttgtgtttttttttttttgttattggtgtttggttttttttgggtatttgggattagtatatgtttagtgtatgtggtgtgttgttttgttagaagttgtagtttttgagttggaggttgttgaggattgagtgtaggaggaaggagatagtgtgtagtggtggttggtgaggagatagtatattttgggttgggtttagtgtattgtttttggttttaaaagtggagttgtaatttggttatgattgtatttgtttgtattgttttgttgagggtgtttgggttgtggtggtggtgaagatggtgattttgattgttggtttttttggtaagtggtttgtgtattaggagaaattttttatttgtgagttgaattggtgttgagtgtgtgtgtttttgtttttttttgttgttgttgtttttatttttttttatttttttttttgttaggatttttttgtttttgttttattttgtttgaatttttttttgttttttttttattttggttgtttatgttttaggttttttttttgtggtgttggtgaatttgttagttgttttgatgtatagtatgatgatggagattgatttgtatttgtttggtggtgtttaggtttttatgaattttttgggttttgttggggtgggtggtggtgggggtggaggtgggggtggtggtggtggtgggggtgttaaggttaattaggattgggttaaatggtttatgaatgtttttatggtgtggttttgtgggtagtggtgtaagatggtttaggagaattttaagatgtataatttggagattagtaagtgtttgggggttgagtggaaggttatgtttgaggttgagaagtggttgtttattgatgaggttaagtggttgtgtgtgttgtatatgaaggagtatttggattataagtattggttgtgttgtaagattaagatgttgtttaagaaggataagtatttgttggttggtgggtttttggtggttggtgtgggtggtggtggtgtggttgtggttatgggtgtgggtgtgggtgtgggtgtggtggttgtgggttagtgtttggagagtttaggtggtgtggtgggtggtggttatgtgtatgttaatggttgggttaatggtgtttattttggtttggtggtggtggtggtggtggttgtggttatgatgtaggaggtgtagttggtttatgggtagtatttgggtgtgggtggtgtgtatttgtatgtgtattttgtgtatttgtatttgtattatttgtatgtgtatttgtataatttgtagtttatgtattgttatgatatgggtgtgttgtagtatagttttatttttaatttgtagggttatatgagtgtgttgtttttgggttatggtggttttttttatggtgttgtggttgttgttgttgttgttgtgggtggtgtgtattagaatttggttgtggtggtggtggtggtggtggtggttgtgttgttgggtgttttgggtgtgttgggttttttggtgaagttggagtttagtggtagtttgtttgttttagtgtatttgtgggtgttgtgttttggggatttgtgtgagatgattagtatgtatttgtttgttggtgaggggggtgatttggtggtggtagtagtggttgtggtgtagagttggttgtatttgttgttgtagtattattagggtgtgggtgtgggtgtgaatggtatggtgtttttgatgtatatttagtgtttttgggatgttggggattttgtggtggtgatttatgagtttgtggtttgtgtttggtttttgttttgttttggtgtggtgtggtttttgtatagatgtttttatatttttgttaaaaggaaaatattggagatgaatgttgggtgatgtgtgttttttatttattttttttggagattttggtgattgttgggtgttgatattagatttgggttttagattgaattttggtgtttttttgagattttttgtatagtatttattatttatggaggaagtggaaagtgttttttttgtttgaggggataaaaaagttaaaatgaggtgagaggtgaagtttatttttgtatattggttggtgtgtttatttttttttgtgttgtttttggatggtgttgattgttggagtttaagtgatgtggagtttgttgtatttgttataaatgtagtaaggtaggtttaagtatttataagttttttgtagttgttattgtttttttgggttggtttgttaatttatataaagagattattattattatttttttttttagatggtggagttatattttgggttttgtaaaattttatgtatttgagtatttttatttttttttttgggttttgtattattttttgtaaatgtattgtgaaaaattttatttttggtgttgtaatgtggggaggagaagttagattatgtatatagttttttaaaaagttttttttttaaaaatgaaaaaagattttttatttaaaatgttttgagttaataaatttaagagatagagtttattttttttataaatttgtaatatgttatttttatgtgtatgttttatgagtttaaaatgtaatgaggaaatttgatagggaaattatttgtatgaattaaaagtaagggaattttggggaatgggaggataggattttttaaggaattttttttaatgaaagagaaggaagttaaaatttataggttattttgtagagttgagtgttaatatgggttgagaaataaaagtattttttgttttggttgttttattgtggatggttggggttgttgtgtgttattttgttgtaagtggggtgttttttatttggttgggggtttgtgttatagtttggtttagaggagggaggaggaagggaagattttagtggtgggattttggattaggttatggatgaaggataaagattagggtaggttatgggttttttaattttttagtaattaagattttgagtagaatttatttaaatgtgttttaaggaaatataattgttgaattaaaatgtattgtagttgagttttttttgtttattttttgtttttttttttggttttttttttttgggaaaatgggtaaaataattgtgttggatttttatatatatagaaatattgattattatttttttttgtgtgaattgggatgtaagttgttaattgatgtgaatgtaaaatgttttgtttattatttttgatgagattttgaggttgtttgatgttttaaattttttaattatattattttttaggtgtttattggtatattgtagttttttttttgaaatttaaaaatttttgtaaaattttgtttttaagtaatttgatagtattaaatattgtatttaaaaattatattgtagtaaatatatttaaaaattaattataatgttaagatgaaattatatttttggaaaaaaaaaatatttgaagtttagatggaaatatgtttattttagtagttttaggtttttttttgtttttttaatatttttttttgttttggagtatggattgtttgtttaaaagtgagtttatgttataagtttaatgagaattgaatttagtttgtatttgagaatagttttaagtataatgttgatttgataattgatgtgtaatttgggaagttattttgataattttgtttaaattatttatttgttaaagtgattataaaaaagtttaagaatgatgtttattgttttttaataagataataaatttttttttttttttttttttttttatttttattttttttagttatttgattttttttgaagtagttgtttttggaagagtttgtgtgtttatggatggttgagtattattatgatttagtttgggataagggtttttttagttttttttgggagatgatttgggaaattttataatgtttgttttgttaatttattgggattttgagggtttaatgggattttgagggttttttttgaaatatataaatttaaaggattttttttgaggttttttgattgatgtttatttttagtttggtttttgtgtttttttgtgtgtattttggagtttttgtgtttaattgttggtatttaggttttggtttaagattaggatgtgggttttattttagaggtatagattatgaaaagttgagttagtgtgtttgggatgttaggtaagtagtttttatagtttggtattttattgtaggtgttttgtgtatagttagttgaaatagttaatgttaggtgttttaattattttatttttttgttttgttgattagaataatatagaaaaaagtaaatataaatttttaatgattttatttaaaaatattatagggtgggggtaaggaaattagttgagatttattttaggattgagattttatttttttttttttgtttttagtagtgttgttttaatttaaattagtggagaaaagattatagtaggttttgagttgattgtgaatttggtgtttggttaaggtaatatttattgtatttatggagtgaaatattatatgatgatagttattatattatatgatgattttatttattttttaaattatagggtggtgtttttgttgtttagtttaattatgtttgtaatttgtgtagggaaggtggataggagtttttgaggtttagtgtaaagtttgtattagtttttgtgggggtgatagtgtgattttgtaaatttgttattgtgtttgggttttgttttttaaattgagggtaggagggtttatttgagggtttttttgttttgttttgttttgtttttgttttgttttgttttttaatttatttgttttttttgttgttgagattttgatgtttttttttttggagaaatttatttgtaatgtattagatggattagttttaaagaagatttgggtatagtgtgatttttagatgtgtgttgggagtgtgattgataggtttattaaaattatgtgtgtgggagaatggtatttatgtttttgtgttttatttttttggtaaagattgggtgttgtagatttttgtttttggaaaattttagttaatttaagaaatttatttttggatgtgtgtttgtttttttttgaaggtttgttttaggttagtttggattttagtgtttttttgattttgttgggttttggttgatttttgttttttttttatttatgtttggtttgggtttgggggtagtggttttagaggtgttggtggtagaatttaatttttggtttgagtttttggaaattttaagtgaaaagtagatttggttttggtgtggttttttttttagtgtgattatttggtgagattgaaaggttaggttagatggggaaaagtgagtggggtgtgggtttttagtatttggtggggtggggtggtgttaggatggagtgagggttggtgggggggtttgtgtggaggtttaggttgggaggtggggatgtagggattttttatttagttttttgtttttgtttgagttaggttttgggattatttttttttgtttgagggtgagttttttttttttttttttttttttgttttttttgttttttttttttttttttttttttttttttttggttttttttttttagttgtgtgtttgttgggattatgttttttttgtttttgggagttgagtggtgtttgtggttggtttggatgtgttttttttgggtgggggtggttgggtttttttggggttttgggttttttgggtgtatttttttgtttgtgtttttttaagttgttttttttttggttttgtttgtggttgagttttgtatattgtgttgttgtttttggggttttggtatatggtgttttttttttgtttttgttatttatttttattgtttttttagtttttgtgttgtttttattgttttttgatttttgtattgagttgtgtttttgttgttggttttttttagtgtggtttggttttttttttgtttttgaagtttttttgttgaggtttgtgtgtggtttttttttttgtttttttttggtttttgggtgtttagttggaggttggggtgggatggggtatgagttttggggtggtttgtgttttttttattagtttttttattgttttggttttgtttttgtagttttggggtgggagggtgtaggggtttttgggtgttttgggagtttattttttttaggtttgtgttggtgttagttgttggtggggggtgggtggagattaagatgagtgttgtgagggatggggttgagggttttgtgtagaaggagagtaggattagtggagagaaagtgttgatttggggttagttgtaagttaaatttttttatatttagttggtggaatgagtatggtttgggttggatggtaataagtgggtgtgaagggagggggaggggaggttgggtattggttgggtttggtgtgagagaggggagggggaggggatgtggttatagtgttttagggttttagtgttattggggatgggtgttgaggggagtgtgtattagtgatttgggtgtggattggggtttgtagggtgtgattggttgttttttaggattttattttttttataaatatttgttttttttattttttggggttgttttggttgtttttttggagggaagattggggagaaggttgtttgtgttttttgttttagaggttttgttttagaaattgttttttaatttttataagaaataaaaaaattataggaaggtttggttttttttttggatgattgtgtttttaggttttttaggaatttttgttttatttgagtttttttgtagttttggatttatttttggggggtgtgtgtgatgtagaattggggtataaaatattaatgttgtttgttatgatattgttttttttatttgggtagagttgtggtttttgggtgttgtgtgtggtgttttttattatggagggaaagttgtggttttgtgggaaaggagtgaaaattgagtgtgggtgaagaggagagggaggttagggggtaagggaagaaagtagataaatgtattttttttagtagttaagttggaaatttgtgttgaaagt

SEQ ID NO: 73 - DNA, 8500 bp, Artificial Sequence
  chemically treated genomic DNA (Homo sapiens)
atttttagtataaatttttagtttggttgttagggaagatgtatttatttgttttttttttttgttttttgattttttttttttttttatttatatttggtttttattttttttttgtggagttgtggttttttttttgtgatgaaaaatgttatgtgtaatgtttgggagttgtagttttgtttgggtggagaaagtggtgttgtgataaatagtattgatattttatattttgattttgtgttatatatgttttttagaaatagatttagggttgtgaagaagtttggataaggtgaagatttttggagagtttggggatgtagttgtttgggagaggaattaggtttttttgtgatttttttgttttttatggaaattaagaaatagtttttaaaatagagtttttggggtagagagtgtaggtaattttttttttagttttttttttagaggagtagttgaagtggttttggggaatggaaaaggtaggtgtttatgaaggagatggagttttggggggtagttagttatgttttgtaggttttagtttgtgtttgggttgttggtgtgtgttttttttggtgtttgtttttgatgatgttgaggttttggggtgttgtggttgtgttttttttttttttttttttttatgttggatttggttggtatttggttttttttttttttttttttgtgtttatttgttgttgtttggtttgagttgtgtttgttttgttggttgagtgtaaaagggtttgatttgtggttgattttgggttagtattttttttttattaattttgttttttttttatataaaatttttggttttgttttttgtagtatttattttaatttttatttgttttttgttggtggttgatattggtgtggatttgagggagatgggtttttagggtgtttggggatttttgtgtttttttgttttgaggttgtggggatggggttgaggtaatgaggggattagtagggggagtgtgggttgttttgagatttgtgttttattttgttttgatttttgattgggtgtttaagggttggagagggatggagaggggagttgtgtgtgggttttggtgggggagttttaaagataaagaggaggttgggttgtgttgagagaggttggtggtggagatgtagtttggtgtgggagttagagggtggtggagatggtatagggattggagaggtggtgggagtggatggtgggggtggggagggaatgttgtgtgttgggattttaaggatagtggtgtggtgtgtggggtttagttgtgggtagagttggagaaagggtgatttggagaggtgtaggtaggggggtgtgtttgggaggtttgaggttttgaggaggtttggttatttttgtttggaggggatatgtttggattagttgtagatgttgtttggtttttgggggtgggaggagtgtggttttggtgggtgtgtagttggagaggaagggttggggagggaggagggagagagggagggaagaatgggggaggtggggaggaagagggaggaggagagtttgtttttaggtaaggggaggtgattttgaggtttggtttgggtgggagtagaggattgggtgaggggtttttgtgtttttattttttggtttgggtttttatgtgagtttttttgttggtttttgttttgttttgatgttgttttattttgttggatattgggggtttgtattttgtttatttttttttatttggtttggttttttagttttgttagatagttatgttggaaagagagttgtgttaaggttaagtttgttttttatttgaagtttttaaggatttagattgggggttaaattttgttgttgatgtttttggagttgttgtttttgggtttaggttgagtgtgggtggggagggggtgggagttggttggagtttgatggggttgagggggtgttggagtttgggttggtttgaagtgagtttttgggggggggtgggtatatgtttggggatgggttttttgaattaattggaattttttggagatagaaatttgtggtgtttagtttttgttgggggaatgaaatgtgggagtatgagtgttgtttttttatatgtgtgattttaatagatttattagttatgtttttgatgtgtatttggagattatgttgtgtttgagttttttttaaaattaatttatttagtatgttatgggtgggtttttttggggaaggggatgttaaaattttaataataaaaggggtgggtgagttgaaaaataaaataaggtaaaaatagaataaaataaagtaaaaaaatttttaagtaaatttttttatttttagtttggagggtagggtttgagtgtaatggtagatttatgaagttatattgttgtttttgtagaaattgatgtaaattttgtattaggttttaaagatttttatttgttttttttatatgggttgtaaatataattggattaagtgatagaagtattattttgtgatttgggaagtgaatgaagttgttatataatataataattattattatatagtattttattttgtgaatatgatgagtgttattttggttaagtattgaatttatagttggtttagggtttattgtaattttttttttattaatttgaattggagtgatattgttgggggtggggaaggggggatagaattttaattttgagatgaattttagttaatttttttgtttttattttgtgatatttttaaatggagttattaaaaatttatatttgtttttttttgtgttgttttaattaataaaataaggaaataaggtggttggagtatttggtattggttattttagttgattgtgtatgaagtatttgtaataagatgttaaattgtaaaagttgtttgtttggtgttttgggtgtattaatttagttttttatagtttgtgtttttaaagtggggtttatattttaattttgagttaagatttagatgttaataattggatatagaaattttagggtatatataggggagtataggggttagattgagagtggatgttagttaaagaattttagagagagttttttaagtttgtatattttagagaaaatttttaaggttttattggatttttaaggttttggtgagttaatagaataagtattataaaattttttaaattattttttggagaggattggggaggtttttattttggattaagttgtagtggtgtttagttatttatgggtgtatagatttttttagaaataattgttttagaaaggattaaatagttaaaagaaataaaaataaagaaaaagaaaagagggggggggtttattattttgttagaaagtagtggatattatttttgaatttttttgtaattattttaatgaatgagtggtttaagtaaaattattaaaatgattttttaaattatatgttaattgttagattagtattatatttaaagttatttttgaatgtaggttgaatttggtttttattaaatttatagtataggtttatttttggatggatagtttatattttaggataaggaagggtgttgagaaagtgaggggaaatttaaggttgttgaaataaatgtatttttatttgggttttaagtgttttttttttttaaaaatataattttattttaatgttgtgattaatttttaaatgtatttgttatagtataatttttaaatgtaatatttaatgttgttagattatttgaagataaagttttatagaaatttttaaattttaaaaaaaaaattgtaatgtattaataaatatttagaaaataatataattaaaaaatttaaagtattaaataattttaagattttgttaggaataatgaataaggtattttgtgtttatattggttagtaatttgtattttagtttatgtgggggagggtgatggttgatatttttgtgtgtgtgagaatttagtataattattttgtttgtttttttaagagaaagaagttagggggaggggtagaggatggatggagggggtttggttgtagtatgttttggtttagtgattgtgtttttttgaaatatatttagataaattttgtttgaaattttaattgttggggaattgggaaatttgtgatttgttttggtttttgttttttatttatggtttggtttagggttttattattggggttttttttttttttttttttttttggattaaattgtggtgtagatttttagttaggtggaaggtgttttgtttgtagtaaggtaatgtgtagtagttttagttgtttgtagtgaaatagttggagtagaagatatttttattttttggtttgtattaatatttagttttataaaataatttataggttttaattttttttttttttattgaaaaaggttttttgaaaaattttgtttttttattttttggggtttttttatttttagtttatatagataatttttttgttagatttttttattgtattttgaatttataaaatatgtatataaaaatagtatgttataaatttatggagaaaatgggttttgttttttaaatttgttgatttgaaatattttgggtggggggtttttttttgtttttagaagaaaggttttttagaaaattatgtatataatttgattttttttttttgtattgtaatgttgaaaataaaattttttataatgtatttataagaaataatataaaatttaaaaaaaaaaatggaaatgtttagatatataaagttttataaaatttagaatataattttgttgtttgaaggagggggtggtggtggtaatttttttgtataaattaataaattaatttaaaagagtggtaataattataaaaaatttgtaagtgtttggatttgttttattatatttataataaatgtgatgagttttgtgttatttgggttttggtggttggtgttgtttggaagtaatgtggaggaaagtgagtgtgttggttggtatataaaagtgggttttgttttttgttttgttttgatttttttgtttttttgagtaaagaaaatgttttttgttttttttgtaggtgataaatattgtataaaaagttttaagaaaatattgaagtttagtttaaaatttaagtttggtgttagtgtttggtggttgttagggtttttggggaaggtgagtgggggatatgtgttatttggtgtttgtttttagtattttttttttgataagaatgtgggaatgtttgtataaaagttatgttgtgttggggtggggtgggagttgggtgtgggttgtgagtttgtgggttgttgttgtagagtttttggtgttttgaaggtgttagatgtgtgttaggggtattgtgttgtttatgtttgtgtttgtgttttggtagtgttgtggtagtgagtgtagttggttttgtgttgtggttgttgttgttgttgttgggttgttttttttgttggtgggtaagtatatgttgattattttgtgtaggtttttggggtatggtgtttgtgagtgtgttggggtgggtgggttgttgttgggttttgattttattagagagtttagtgtgtttagggtgtttgatgatgtggttgttgttgttgttgttgttgttatggttgagttttggtgtgtgttgtttgtagtggtggtggtggtggttgtggtgttgtaggggaggttgttgtagtttgagggtgatgtgtttatgtagttttgtgagttggagatggggttgtattgtagtgtgtttatgttgtagtggtgtatgggttgtgggttgtgtgggtgtgtgtgtgggtggtgtgggtgtgggtgtgtggggtgtgtgtgtgggtgtgtgttgtttgtgtttgggtgttgtttgtaggttagttgtgttttttgtattatggttgtggttgttgttgttgttgttattgagttggggtaggtgttgttggtttagttgttgatgtgtgtgtagttgttgtttgttgtgttgtttgggttttttaggtgttggtttatggttgttgtgtttatgtttatgtttatgtttatggttatagttgtgttgttgttatttgtgttggttgttaggagtttgttggttagtgagtatttgttttttttgagtagtgttttggttttgtggtgtggttggtatttgtaatttgggtgtttttttatgtgtagtgtgtgtagttgtttggttttgttgatgaatggttgttttttggttttggatatgattttttatttggtttttaggtgtttgttgatttttgagttgtgtattttggggtttttttgggttattttgtgttgttgtttgtgggattatattatgaaggtgtttatgggttgtttgatttggttttggttggttttggtgtttttgttgttgttgttgtttttgtttttgtttttgttgttgtttgttttggtggggtttgagaggtttgtgggggtttgggtgttgttgggtgagtgtaggttggtttttattattatgttgtatattggggtggttggtgggtttattggtattgtgaggagagggtttggagtatagatggttggggtgggagggagatggagaggaatttagatggagtgagatgggggtgggggggttttagtggagagaagaatggggaggggtggaggtaatgataataaaaaaaggtagaaatatatgtatttggtgttggtttggtttgtaggtggaaagttttttttgatgtataaattatttgttaaagaggttgatggttggggttgttgtttttgttgttattgtagtttaggtgtttttggtggagtggtgtaaataggtgtagttgtggttaagttgtagttttgtttttggggttgggagtggtgtgttgggtttggtttggggtgtgttgtttttttgttggttgttgttgtgtgttgtttttttttttttgtgtttggtttttagtggtttttaatttggaggttgtaatttttagtagggtggtgtgttgtgtgtgttgggtatgtgttggttttaggtgtttgggggaagttaggtgttagtggtggggggggggaggtgtaggggggtttgtagggggtgattatggtgtagttagggaggggtttggggatagtgggaggagtgtgggtttgtggagagggttggagagttggggttgttgagtttgggatgggttgtttgttgtttgtttggggttgtgtgtttggagtggaggtgtatgtggggttggtggtgtgtggggtttagtagttatatgttgggtttgggttgttattaaatgagtgtgttgtggttaatgggagttggtggtggtggtgatttgtatggtgtgttggtgagtgatgtggggagggagtagatatattgggtgtgggtggtggagtggggaggaggggaggaaggagggggagtaaagtaggaaggaggggggaggaggtttgggagggggtgatagttatattgttttttgagtgtgtgtgtgtggtggtggtggtggtggtgaattttgagtttgttttttttgttgttttttgtttgtgtgttttgaatgattaatgattgggttgaaaagtgaagattaagaaaggattgttgtggggtggggggaggaaatgtagtttttggttaggtttaaatgggtgtagtggagatttagttttttttttgtttttgttggttaattttgtgtttgtagggaaggggaaagttgagtgtggggttggtatgttgtttttagtttttttgagtgttgaaaaggaggggtgtttttttggatgtaggggatattttttgagggtttttgtaggttttttgtaaggattaggtggtttagttattttttgttttgtatttgtttttggttgtggtgtgtattgaagtttgttagtgtttgtttttgtagtgaaggtttttatagtttaggttttataatttgggtaaagggggagtatttgtgtgggtatggttttatagttttgtttagtattagttttaaatttttgtggggaggagttttttaatgagtttggggttatagttatgtattttttttaatttggattttttttttttggaaaaggaatttttaggaaggttgaatataataagatttatttggaatttagtttttgaataatagttgaaaaagtttgttgaattgtaaaataatgatatggtgtatgtttttttggagtgaattttttatgagttggttgtttaagaatggagaaaattgtgtgaattgtgtggggttatataaattgaatgaaaggtggggttttaggatgggttttagttgttggtttgtgttatgtaaaggaaaggtttggtttgtggaaagagtaaggtatttatttgtggttattatttttaaattttaaagtggttttgatttgggaatgtgaaagagatttttaaatgtagttttaagtagt

SEQ ID NO: 74 - DNA, 263 bp, Artificial Sequence
  chemically treated genomic DNA (Homo sapiens)
tatagtatttattatttatggaggaagtggaaagtgttttttttgtttgaggggataaaaaagttaaaatgaggtgagaggtgaagtttatttttgtatattggttggtgtgtttatttttttttgtgttgtttttggatggtgttgattgttggagtttaagtgatgtggagtttgttgtatttgttataaatgtagtaaggtaggtttaagtatttataagttttttgtagttgttattgtttttttgggttggtttgtta

SEQ ID NO: 75 - DNA, 263 bp, Artificial Sequence
  chemically treated genomic DNA (Homo sapiens)
taataaattaatttaaaagagtggtaataattataaaaaatttgtaagtgtttggatttgttttattatatttataataaatgtgatgagttttgtgttatttgggttttggtggttggtgttgtttggaagtaatgtggaggaaagtgagtgtgttggttggtatataaaagtgggttttgttttttgttttgttttgatttttttgtttttttgagtaaagaaaatgttttttgttttttttgtaggtgataaatattgta

SEQ ID NO: 76 - DNA, 65 bp, Artificial Sequence
  PRDM14_Amplifikat
cgacgttttcgcgtggtttcgcgttgttcgcggttagtttcgtttcgtttcgtaaggagcgtgtt

SEQ ID NO: 77 - DNA, 16 bp, Artificial Sequence
  PRDM14_Primer_forward_
cgacgttttcgcgtgg

SEQ ID NO: 78 - DNA, 20 bp, Artificial Sequence
  PRDM14_Primer_revers
aacacgctccttacgaaacg

SEQ ID NO: 79 - DNA, 24 bp, Artificial Sequence
  PRDM14_Probe
cgcgttgttcgcggttagtttcgt

SEQ ID NO: 80 - DNA, 86 bp, Artificial Sequence
  DMRT2_Amplifikat
ttttcgatcgtcgaattcgttggagaagcgggcgcgatagggcgatgagttaacgcggagggagcgcggaggtcgcggaagtcggg

SEQ ID NO: 81 - DNA, 20 bp, Artificial Sequence
  DMRT2_Primer_forward
ttttcgatcgtcgaattcgt

SEQ ID NO: 82 - DNA, 14 bp, Artificial Sequence
  DMRT2_Primer_revers
cccgacttccgcga

SEQ ID NO: 83 - DNA, 24 bp, Artificial Sequence
  DMRT2_Probe
gcgcgatagggcgatgagttaacg

SEQ ID NO: 84 - DNA, 126 bp, Artificial Sequence
  AC051635.7_Amplifikat
cctcgtatccaacgaacgaaactctaacgaactccgcgcgaaaatccgaactctaacccgaacgaataacgctcaaaccccgacctaaaaaaaataacgacctaaattacgacgaaacgtcccctc

SEQ ID NO: 85 - DNA, 20 bp, Artificial Sequence
  AC051635.7_Primer_forward
cctcgtatccaacgaacgaa

SEQ ID NO: 86 - DNA, 18 bp, Artificial Sequence
  AC051635.7_Primer_revers
gaggggacgtttcgtcgt

SEQ ID NO: 87 - DNA, 28 bp, Artificial Sequence
  AC051635.7_Probe
tccgaactctaacccgaacgaataacgc

SEQ ID NO: 88 - DNA, 118 bp, Artificial Sequence
  CYP1B1_Amplifikat
ttttttaaatttagtcgcgcgttattatcgtgcgagttttcggtcgttttttttttcgtagagaggataaaggcgtttattatgtcgcggggggcggtttcgggtcgaaggttttcgt

SEQ ID NO: 89 - DNA, 22 bp, Artificial Sequence
  CYP1B1_Primer_forward_
ttttttaaatttagtcgcgcgt

SEQ ID NO: 90 - DNA, 20 bp, Artificial Sequence
  CYP1B1_Primer_revers
acgaaaaccttcgacccgaa

SEQ ID NO: 91 - DNA, 26 bp, Artificial Sequence
  CYP1B1_Probe
tcgtgcgagttttcggtcgttttttt

SEQ ID NO: 92 - DNA, 84 bp, Artificial Sequence
  SOX1_Amplifikat
tcggtcggcgcgtttattttttttcgcgttgttttcggacggcgtcgatcgtcggagtttaagtgacgcggagttcgtcgtatt

SEQ ID NO: 93 - DNA, 15 bp, Artificial Sequence
  SOX1_Primer_forward_
tcggtcggcgcgttt

SEQ ID NO: 94 - DNA, 18 bp, Artificial Sequence
  SOX1_Primer_revers
aatacgacgaactccgcg

SEQ ID NO: 95 - DNA, 21 bp, Artificial Sequence
  SOX1_Probe
cggcgtcgatcgtcggagttt

SEQ ID NO: 96 - DNA, 29262 bp, Homo Sapiens
ttaagtagaaatgcagcttacaatttgtaactgttgcaccatttcttctcggtaggctagctcccttttcatctgatcctgaaaattatctggtaggagagagagatagagaaagattaactaaagtgtaaaatctacttttagtttagctagtaaaaacattattgacagtcccatggacagcccccctacttttaagtatttttttcataggcaaattatatgcttgtttgaagaatgttttcaacactctataatttaatcagactagacagtaaattctgagtgtgtcttatattttacagtatctcatattccatctagtataatctcttgcatatgattacacagaaatatcccacacaatcatgttctttaacctttgcacacttgtgcaaatcacaggtattgggagcttccactgtcttcagaagtccagcaagagtcagtagggcaggcctcagatagagctgagcatgggaaatgctgcccctcctgcacataataccttccgggtaaataagatgtgagtctgtgaaaaatgcctgcctggcttcactgcagctcatctcactcctaagagagaatacttcggcctgactcccctgtgcagcaaactctctcaccctgggatcagccttattttatgttcctgctttgtcctggtgcctttctacagaccttaccttaatctgagaagaagagaactttaagagatattgtcatgcaaaatatttttgctattctacatattgaccatatttattgcattagggaaaaaatgacttccaaatgtacagtttagtgttacatcttctccacgtgatccttttaaaagtgtggacgtggctaactttgcctttttctgcactgaaggagaaatgagcacgatttcttattgaatttgtggttgatagggcagcagcttgaggaaaccagaaacttcatcattatcttttcttctccttttcctttcatcttcacagccaactggtgtgtgagttctatgtgttccaccatcatattctcccctctttgccattgttacctcccacgtgcaggcacctcatccctgaatcattttccgactgaccacctgccaccagtccctttctctccaaatacctttaattccctgcttaaaaatctccaatggctttccaacactttcaggatagtaaatcctttaccactcatgagactctgggtacttagagatgaaaaggctttgttctttttatttttttcaacttctaccttttcatactatttgaatttcttatccaaccccaaacatgtgttctaattaatttttttaaaaagacccaatccctactgtcacctctgattttgatgtcaaagtcactgtaatagagggaagtatgtggtgccatgcaaagattgagagaagagctgtcattcattctgggaacattagaggggagagctgcttgagcagacacgtggagaacagcattctacataaagacatggaaggaggagaggggaactgcatatggctcagctggctgcagccgagggcacggaggaaatcccctgcaccacaccagccaccaaaccactctccagtcctcaactatgcattatacttccagcctctgtgcctttgcccctgctgtggtcttgcccttgcagcaaacaactgccttttctttaaagtccagtccagatgctacctcctccaggaagtcttctccaattctgcagcccctcctgccagaattatttacccatttttttttgtacttctccagcaccctgtccatacctgtattaatgcatccataatacatgctatgattagttgttatccatctgtctccctgctaaacagttgagttcttagagggcaggaagatacgtttagacactttaaaaatttttaaggcctaccacagtgcctggcacacggcaggggctagctaataaacgaggagtaaaaacacacagaattatccaccagcaggttgagattctgccatctatagtaactaccccactctggagcctcagacctttatctaaagaaacaaaggtgtgaaataatgtgctctttcaggtgttttcttgctctagcattttaagctttgatgacaggccgagtgtggtggctcaagccaataatcccagccctttgggaggctgaagcaggaaaattgcttgagcccaggagtttgagaccagcctgggaaacatggaaaaactctgtctctactaaaaatacaaaaaattatctgagcatggaggtgcacaactgtagtcccagctacacaggaggctgaggtaggagaatcacctgggaagtcgaggctgcagtgagctgagattgcaccactgcactccagtctgagtgacaaagtgagactctgcctcaaaaaaaaaaaaaagaaaaaatttttggtgacaaaataaattgatttgattgggcttcatgcacccacttgtctttcctgtgcaggggaagtgagggaaagattttgatttacaccagtaacaattaggcgaaaggtaccatgtgaggagctagcatccacctcaccaggtcaggatgctctagaggtgggtctaagggtacagggcaacaggggaaccagccctccacaaactgccctggttccaacacttggtcctgcgctgtggcccgcaggcctccaggaagatcagtgtggttccagacactggagcacatggcaagcatggctccctttgtgaagaagaaaactttcctctgagcctctagggatccaagatgcctttgaccagggtggtaaactaagatgaattaggaaggaggggctgcctgaagccgaccaggctggagcacttccctgggatcacagaagattctaattttagaggagggaacagctaagggcaattcagagtggaatgatgaaaactagtcctaacttaactcatgctcatttttctatgatagtacacttaatataattccttaagttaaaatgaaaaacaaaaaagaagccattaaagtattcgaaataatggcaaatttttttttaagattggagtggggaagagcataaaaggcaaaaactgaaaaggaaaagactggttgatttgatcagacagaaatttaaaactttggtatgccaataaattacaaacagattaaactccccaaacataaaacaccatagtcaacatttaaaggtaattgatacaaaccaaaaaatacttgcaacatgtcaaagaattaacattttagtataagagggtttatacaaatcaataagaaaatgaacacatcaacagaaatatggggagagaatataaatgggcattcacaaaacatatgaaaggatgctagacacatgaaaaatgttcaacatcaccagcaatgaaagaaaaggaaataatatgaaataccaaaatttcctcttaagttggcaaagattaaatgaagagatgatacatgctgttccaaagatgggagcagaaattagttgaaactttctggaaagcaacttgaaattatatgttaagacttttaaaaagttcataccctttaacacaacaacacttttaggagtttaacctaaggaaataatagtggatacatgcaaagacttagttacaagggtgtccattatctaaaacttggacaaaccttaatgtccaacataacagtatatttatacactgctgtgtagtaacagaacgaggcacattttagctaaaacaaaaaggaagtaaaaaatgttgtgtattacatttcattttgttttataaaagcatttaacaagcatttaaaaaggctgaaactccaaaatgttaacattggttatctctaggtggcaagattatgggtgatttttgtttcctttcctttttatttctgcatacttaaaattttccacaacaaggatgtgtatagcttttgagatataaagattgttaattggcaaacatacaaaaatctaaaattttttctatgttcttttttttttttttaaatttgaggcagagtctcactctgtcgcccaggctggagtgccgtggcatgatctcagcttgctacaacctctgcctcctgggttcaagcgattctcctgcctcagcctcccgagtagctggggttacaggcatgcaccaccatgcctggctactttttttgtatttttggtagagatggggtttcaccatattggccagggtgctctcaaactcctgacctcaagtgatccacctgccttggcctcccaaagtactgggactacaggatgagccaccacgcccgaccatattttttctatgttctaaaggttgatgaagacagagtttaattggagatggaaaaaatcattaagccaacttctgtaatgagaatcacttataacccaactatttttggaaaatgataatacgaaaggaagtagcaaagaagagcactgaagtgcagcatgtcagccaacacaacagcaaggctgcacactgcaaactcagacagctggaaaagccaaagggttttccaaacagcaataaaaagtatctagcctacattcctagaaccataagtaagaagacaaacccatagggtacatctggttcacatctggttcacctggaatgttctaagcaagcagtgggctttggggttcaatttgtttacaaatgtcttcattttgttatctctatttttaaagaaccattgaacttttttttttttgagacagggtcttgctctgtcacccaggcttgagtgcactggtgtgaccagagctcactgcagccttgacctcctgggttcaagtgatcctcccatctctgcctccttagtagctgggactacctgtgcatgccaccacacttggctaatttgtgtgtatgtgtttgtgtagagacagggtcccagtatgttgcccaggctgatctcaaacttctgggctcaagcaatcctcctgcctcgacttcccaaagtgctgagattacagacctgagccactgtgcccagccaaaacttaaaaaaaaatttttttcatagccatcttctactgaaaggagtttaatctgtacagtattttggaatctgccctgccaccccgaccctgcacttcatctcccagagtatgctacaaaaagaaagaagaaggaaggaaggaagggaaccactgaacataaaatgaattcaataatggccacagatgaaagatgcagacaaccatattcagggagatgagatgtagtttgtttttaataacaaggactcttaacagtaatttggaagagcaattttttataagaatctaaaatgatgacattttagatgaaatctaacatttttcataaagccccattcattagtgctttcctgtaataaccaactggcctttccactcagttcttgtaagtgccatgaatttgtcactagatctgcaaatctaaggattcaactcatgagccctggatactcacctttatacaagtcttcagtgatccaattccatcctccattgtcagttttaatctctttgggtataaccccaatgttcctatcaatcatttattgagagtatgctacatacccacaatatgccaggtgctgcaggtggcaacagaagaacattctgggtagctcttccctgaatctatttacaatgtgggttgggggagtggagagtaacacgagtgaaacagaggaggagtcaacacagaaaactcatggtactagaaatgaacacaacaggacttcagaaaatcgtgcctactgcaagagtggaaaggcttcttggatgtggcaaaactttagctgtgctccagataagaaggaggacttggatgaggggaggcgctctggactagaggaacacggtgtgcagaggtggagggagaggggtgagagtggtctgccaggtaactggagctgagccgggggagaagcagaaataagggtggagaggttgggggaggggcacacaattatgacaggttttgagagtcagttaacttagatataccatgatacacagtgcaaatcgttctagcttcttgaggtgaagattttgtgccaaatctagagttttaggaagacagggctaagagcagcaggcagaaagggctggagtggagaagggaggtgaggatgcaggccaccctgctggtgacggccttctccattcattgccacctttagcaggtcccaggtttggggctaggctctgaggttttaagatggctaatgggaagaaataaaaatgaataaaaactacagcaaaacgatgaatgctgtaataaaggaaggcatagggtgctggaggaaaagagaggaagaagagatacaattgctggggaaggtgtacataatgcagtggcaaacataacttctggatttacagctgcaaaaatgatcagaccagtgtgagtgagggagtttggaatggtggaattgggagttacctttaataatttaacctgtccaactgaacatgattttcattgcaaaacatgtttgaccagccatcctattgtcatctcaaagtaaccttgataatggtggggcccctcctaatccatttccccaaacacctactcccactcaattccagcttctcctttttccttagtatatcctccctacctctctgttgtgtcctacccggttcgttgattaaacttattgtttagtattaaaacaagtttcactccctgttcctccctctatagtgacagctcaataaacctttacaagttctggtttcttacattagctggtttactatacagtcactacaagaatgtcagcatcaaactttaaaacagtatatagtagcaacaactcacatttaatagtaattactattcatttgtcactatgctaagcacttcatgcctttcactcatttaatcctctccacaaccccaagaggtaggtagtagtattgttatagtgttgaaaagagatcagggaattttcctaaggttactcagccagtgagtagagcagtcagcatccacacctggaaccctctctatgacctgccatacttctctgcctctgctgtaatggcaaatgcctgccttgccttgctttctcctccccagatttccccatcagggctatgcataagtatcagtggagagcagctctggaagcctctgttccagcaagcgcagagacttgcttgtttctcttcctcctcccaactgctgctccccaaatgtggagacttgtttcttctcctccatcttcctccttcttcctcctttcctgcctcttcctcctccttctcctttttccctctacccttcctcctcctcctcctccacctgcccctcctctctgttatctttatttgtaccctctccattcttacgaccattcctgtggtcctcattaacccttggaaccacgacaagaagccaattttttttttttttttttttttttttttggagacggagtctccctgtgttgtccaggctggagggcagtggcgtgatctcggctcactgcaacctctgcctcccgggttcaagtgattctcctgcttcagcctcctgagtagctgggattcataccaccacaccagctaattttttatatttctggtacagacgaggtttcaccatgttggccaggctggtctcaaactcctgacctcaagtgatctgcctggctcagcctcccaaagtgctaggattacaggcgtaagccactgtgcctggccagaagccaaaaatttggacccaagtttagaaatgcttttctagagctcagtgctgttcctctccttttcttctttctgcttcataatcaccatcataattgtacttatcctgtgcccagcatgtgcacagcacttcacataggtctctcattcagtcctctcattcttctaagcgacaggaattatttgccccattttacagtttccaaggtcatacaaccagcaagtagcagagcctgaaagtgaactcaggtctggtcgatttttgagcctagattcttaattctcacatgctacagctcctagcctaggtccacagtgctctaagtgaactggattttaagtgtggtgactgtgagcatctgttcacctcctagtaaaaagctttgcaaaactctcacgagaattcctctatgcttctttccgatgaggctttgcaaatcttggttttccccttttcatctgagtgaatctaaatctgtcccctagcctcacggcccctcacatttagttaacaagcacataatgtgcatttgctattttcatccgtgtgaaattgactgcctctttgtggtgtatctaaaccacgcattatttaaacttgggcacacacatgccacttccttggtcagtggagtatgttgcagatgaaaaagaggaaaattttttttgttactgtttaattgaagtgtttcatacatgtggcaatcacagaggatacatattagtgcacatcaaaatgatgaatgagaggtctgaattgaaactggccagtactgtaacattctaacattttgtttaacggaaacatgtactacagagcagttactatgaaaaatataaattattatggattacttaattccttagaatgaatatgaattggcttttattaatgggatgaattatgactacagaggtttcatagggagttagaagggcatgttagggattcaatgggacttggacccactctgctagatctaaaagcagggacttgcaaactcaacaattagataaacatcagctattgggaaaacgtattcaatgcctctcattgggggcaaggaactgtgcagtctttcttaagatacagtttcaaaagttagagaatcctagatcctttcaaagcacctgtttcttatggtttcaaagatattttaaatgtttctccttttctcaaagctataagtatcacaatattcctaattatgctatcaaaagctattggccattctccttctttcagtctcattctaaagccctgcaggcattctctgaattcaaaataactgaagtaccatgagctccagcctcctttggagtatgcagagaggacacactttgcagaccctcccattccttgtggtcagagttctcttccatcatgcagttacctctacattttgaatcctcactaaatgttctggtcaaatttagtttgacatgttaccaggaacctggtgctattcaaaaatgctacctaagtgtgtcattcagttgtgccagtgattacatttaggaagccctaatgaatgaagaccttcaggctgacattattgaaattatcataattatttaaaaatcttccagatgctgatacaggaatcatctggcacaggaattgccaacttgagttttgtgatttctggattaataacaagaagcatgctgacattctaaaaaagtgccctggaaaaaattaattttaaatatatataattagaaaaataagtttgcaggccaggcacagtggctcatgcctgtaatcccagcactttgggaggccgaggtgggcggatcacctgaggtcaggagttcgagacctgcctgaccaatatggtgaaactctgcctctactaaaaatgcaaaaattagccaggtgtagtggtgtgtgcctgtagtaccagctactccggaggctgagacaggagaattgcttgaacccaggtggcagaggttgcagtgagctgagattgtgccactgcactccagcctgggtgacagagcaagactccatctcaaaaagaaaaaaaaaataagtttgcatactattttcccactttcctttctctggagaggtaatatgactaaatcaaagtccggaaagcttgaaaaacactactgggatgtatttgtccagatgtgacccagaccagggcaggtgaattttaaaaatctggacacctaccataaagttttaggaaattccaagactctgggagtagaactaacagtttttaggctacaatatctcctgcctctaaattcagaatggaattttaacattaaatatggatgggaaatctaaaactactaaaattataacaatttcatttaataaaatagattgtgtatactgagcctttaaagtttagattttcatatttatacatatctcaagcatcaggaagctatcaggaacaatctgagaatgaaagttaactttttcttgttttccctactttagagaatgtaaatacaaagtagttcttttgttttaaaatctataatcgaactatatctaaatatttaaatatatttacatatttaattatatatttacacacattttaaaatacgtacaacatgcacatacagatacacatatatccatacacaaataccaaaaggttcttggaagaaattttatctgtgagtcaattcaaagcctaaataaaactaaaatttatgaatatttaggcagaccatgggaagactgtgtgtgttttgcacaatcgcttaatacttagaatcacattcttaagcctaataatagaaacgtaatcaattatcataaatacaatgaaataaaagtgatttcttactgaatactgggaaagatgtgtttccttttaacacctggaattcttgttccagtcgtctccgtaaatctatttgttcaaataaaaccttctgaagttcttctaataaaaaaaagaagagtcattttactaatctttacaaataactctccagagaactgttatatatggcaatttattattataagacaaaatattttaccagtttaaaaagtgttgcatagacataggatagattttgtgcagaaatccatgaatataaatcaatgtaatatattattttaaagtattatattacagtgtcatgtattgattgatatgtatgcattaatctcaattatatccacccaatggtccatatattattcatatgttgcttgtcaagctaaaaatatggtggagaacaaaaatatcctcctattatctccacagtcgtttaaagctaagagaagttctacagaattgaaactttcatttacctttccccatattttctacatcctttttcagtgaatgaggtgagttggtttcttgtgtatgttcaccttttaaaaaagcaggaaaaatactattagttttgtgtaggctagttctgtaagttttcctttacattttcttttaatatctgcaaaacagtttatttaatataacctgaaattggaagtcctcataaccaaatgttgtcctcatttattcgcatataatcctcctgaaacacggaggggaggtgcagaaaaggagggcagagcctgcctggcctgtgatggcagctcccgaaaagcagattcttgaagttattccctctccaaccccctaccgccatccatctttacaaggaaggaaattgctagaatgggcaaaagaggagtctggatagtcaagatttctggtagaaatctgattggagtcccactgctccttgaagggaggaagcttggtttgaatggaaaggttctcaagactagaggcaggtgcccagccttctcgggccatcaaaatttgggacactgaaaaagaaatgtgaggaggctttgagttgtaaatgataagcctggaggggttccctaataattgatagtttgtttttttttaaaaaaaacaacttgggccgggcgcggtggctcacgcctataatcccagcactttgggatgccgaggcgggcagatcacttgacgtcaggagttcaagaccagcctgaccaacatggagaaaccccgtctctatgaaaaatacaaaattagctgggcgtggtggtgcatgcctgtaatcctagctactcgagaggctgaggcagaagaatcacttgaacccgggaggcggaggttgcggtgagctgagatcacacctttgcactccagcctgggcaacaagagcgaaactccatctcaaaaaaaaaaaaaaaatcaacttaaagctaggtgtggtgactcacatctgtaattgggaggctgaggcgggaggattgcttgaggccaggagttcgagaccaacctgggtaacatggcaaaaccttgtccctacaaaaatagaaaaattagctgaatgtggtgatgtgcacctgtagttccagcaacttggaggctaaggtgggaggatcacttgagcccaggagattgaggctgtagtgagctgtgattgcactactgcactccagcctgggtgaccctgtctcaaaaaaacaaataaataaataaaataaaaagtaaaaaaaaattaaaaatcaacttaaaacagagacaaaataagttaacttatattagtttgtaaacagtgacttgcttgctgatatctcttaactgctcttcctcgaccaaagaaaactatattgcgcataaaggttagatcgttattcctatttcgcttacatgctgactaggatggcaagttaagaaaatgtctttatccacagtcatgaattgagtctacaaatctggtctaaataaaccagaatccaatcattcaggcaatcagaatttttaaaaaattcaaccccctatcctcaatgctcacataatttaatcaagcttttcatttctgtctgaagaggtgtggtagaacaaacaaaggggctctgaggcctcatggatccccctccctttcaccccatccctcctctgtgtccccagagttccctgcacaggcctcaggcatggtgctgtttccttactccccttcctcagtcagtgggccatgtgttacttggcggcagaggttaggtatggccagtgcctagcacagcgctgaacatacaataagcactcaataaagggtctgcagttgtttctgaaaaggaccccaggaggtcgtaaattctaaattacagtaagcgggggccagaattcatcaaagatctccttactatttatttccctcagcaaaaaccaaaatgtaatggccctgggcacttgtagaagtacggggagatttctttgctgaggtaaaaatttctgcaaagagggaaacagaatttctccctgaagtgctgacctataacagtatcatggacagacagggaaattttcaacatgatattatcaatggcaattcaagtgcattttacttgatgactgtgaggagtatgtttgtgtgtgtttgtgcatgtgtgtgtgtgtgtaggtaaatacatctgtgaaaatatacacaaatattccaggacatatgcatcattagaggaaggagcctaataatatccttggcatccctaagttccttaatagcaagcatcttctctaatatccagatcagattcctatagcctcattctcattctcatcttggacatgacctctctataggctcagatgtactcttgaaccttgataccttggctttcttctccatataaaaagaaaatagagaggaaatatctgtgaagcattttaaatatagacctcaatgcaattcctagaaaaacactgttatctaaaacaagagtaacatgaaggttgataacaaattattaatgggtaaaccaagaaaaatagtattttgagatgaagatacatgcatattatgtgcagtctcagttaaccagttaaaggtgtagaagtttcaaaaatactggcatacaatattgaatctgaacaagagaagaaagaagcatgcatgtatctctgcatttatctgcagggcataatgacactatcattctacaactttctcaaccactcaaagcatgatttaaatgagatctttattcctgaataggcaattctagaaaccatagtcttatcaaattatagaccagattccttttgactcattagtatattttgtggactgtttatcttatattatgtttcagttagatagttgaatttaaaaattaaaatatgatatgtaaaatgcatttctttcctacttcataattagtagctttacattggtatgaaaccactaaacaagcagctagtaaatggaaactatattaaacacaggcaaatctactgatgatgttaataaaaagcttgtcttttcatcagctttgtagaggttttattaacaatttgcattggcatctatttcaaacagatattttgctgcatcttctgggtaaaatctgccaattttgagcttagaggattcgaatgcctcacttacaaagggtttttaaaatggctaaatgttaggtaaataaaaagcacagaagcttccgctgccttttgtgtatcttttactggactgttgcctttcgtatattactaatctgtgaaaaccagattgttaatggtggttaaaaatgacctctgggagcctggatatatttgttcactattactgctaatggtttccatctggttaaaaaaaaaggcagtctaatactagattaaataaacgtgatttagttgacagtgagctcccaatttttctaaaaattccttcaggttggctacattttactttttcagaattaatgaatgggtttggaaacatccctaaagtgcttacttttttatcccctatatttccctcaccccttttgtttttaaatatggactgcttcagaaatttgtatgttatccttgcacaggggccatgctaatcttctctgtattgttccaattttagtatatgtgctgccaaagtgagcaatggattcctcttttgaaaaaggggttggtgagccagatgtggtggctcatgtgtataatcccagcactttgggaggctgaggcaggtggatcacctaaggtcaggagttcaagaccagcctggccaacatggtgaaaccccatctctactaaaaatacaaaaactagctgggcatggtggcaggcacctgtaatcccagctacttgggaggctgaggtaggagaatcgcttgaacccaggaggcagagattgcagtaaaccgagatcacgccactgcattctagtctgggtgacagagcaaaactccatctcagggaaaaaaaaaaagagagggggtggggggaagcacagcaattctaacagtgtagagttgtaggagagaaaattatacatggaagaagcatatttcttggaagcccagcctcaaacatatctaagactgtagaaaaaaactggtttgaagttggagagtaacgggtaactagggcataaaacgtctcctgtggatggaagtgactaaaagctgctgctaaaggcccagtgccatggctcacacctgtaatcccagaactctgggaggccgagggagagtgcttgaacccaggagtttgataccagactgcgcaacatggcgaaactctgtctgtacaaaaaagacaaaaattagctgggagtggtggtgcactcttctagttccggctaatctgagtgggaagatcacttgagccctggaggtcaaggctgaggtgagtcatcattgcaccactggccactgcactccagcctgggtgacagagtgagaccctgacttaaatacaaaaaagaagaagaaaagaaaaagctgctgcttaggaaggtgtccacaccaggactttccaagtgcacatttgcaggacattgtgatctgcatggtttctgagaatcctgctcatccaggagggtggaggcagcatcgtgccatatcagggaaactacatcactgctgagtgcaactggagaccagagagcctggaatgtcaggagtcggctttcctggtctctccaaggacctccaacagcagtggttccacattctaggtgaatattccaacccactcttggttctgccctcacatgtcattagaaactggaagtatgagaaagatgggtgagagaagtaacatgctgaagcagatatgagcagtaaatagcaaatgaggaggagatggactatatgaacaacacaaacaagcaaaaaaaaaaaaaaaaaaaaacagccaacagattcaatagcactagctttcaaggtactagaataattactttctcttaaatatcatggcaagcctctgctcaagaacctgcaatggctccctatggtctccatcaaagactccattctaaagttctccccacaaagtctctaggttctcccattcttgtccaacctgctgagccatcctgtctccctttttgagacaagttctcgctctgccacccaggctggagcgcactcacacaatccaggctcactgcagcctcaacctcctgggctcaggtaatcctctcacctcagcctcccaggtagctgggactacaggtgcacaccatcatgtctggctagtttttttctgtattttttttgtagagacggggtttcaccatgttgcccaggctggtcttgaacccctgagctcatgtgatccatccatctcgccctcgcaaaatgctggaattatacgcctgagtcactgcacctggcccatcctgtgtttattgcctaacaggcatttatttttcacatctgctgcctacaactgccttatgtcatttctctgtcctaaggtgccctctcctctctttcttgtgcaaccaaaatcagaatgccatccaagtcttttcttgttaaggattgaatgcctgtgtcccccttatccccaaattaacatatttaaatcctaacccccaaggtggtggtattagagaagggggtggggggctttgggaggtgattaggccaggagggcagaccacttatgaatgggattaatgcccttataaaagaaaccccagggagctcccttcctacttttccaccatgtgaggacacagcaagaaaatggccatctatgaaccaggaagagagctccctcaccaatcactgaatctgccagtgccttgatcttggacttcccagcatccagaactgagaaaaacagatattgtctaagccacccagtcgatggtattattttttttttatagcagcctggccagactaagacatttttcttccataaggctttttcaacttctgcaaatcttactgatttatcccttcctgggctgaagttctaagtgcttattgtctttattctgcccctttgtacctgatgttctagtgttttacaatattagtctggtcttcctcagctagaaaatatactttctgagggcagagagatcctaccctacaggtaatcccgatcacccctaccttaggaaagggtacaaatacattccacaaatacttgttgtactttttaattcattctgctttgtaagagaaataccaactaacgctattctaaatccttagttgtcatgacgagttttaaagcactaacttgttcctatatgtgaaaagcacattttgatccatttgtatattctgactaaattaggctaattatatattcagtttactggggaaatttgtgatgctccaatagaaaataagttttgttctcatctgacattttgaaaatttctttcaggaacaaacaaaaccacagcactaaattttaaccatgacctgaaaatattaattagcgtatatgtctactgtagcctccaacagcaaaaatattgtacatttttagagctcatttaactataagagccaaacgaatggtcaggtgacctgttccgttggtggacatgagagaggagaagctgattaaacagttatcactcttctcaagctgaactctgaattcaataaataagagcatttaaatattgtgtcctgtacacatgtagggtataccatgtatatggggtacaatatgaaacttttgccatttgaataaagatcaaaaaatgtggcattcacccatcccttctatggaaatacattctttctcctccccaccattttcttttctttttcttttttttttttttttgagacagggtcttgctctgttgcccaggctggagtgcagtggtgtgaacatggcttactgcagcctgtccttctgggctcatgcgatcctcccacttcagcctccagagtagctgtgccactatgccaggctaatttttaaaaatattttgtaggtctacctatgttgcccagtctggtctcgaactcctgggctcagggaatcctcctgtttcattcttccaaagtactgggattataagcatgagccactgtaccaggctgcccccagtcatttcatccctacttggtttcctactccttgtcttggctgtctcccttttaaattctcccttgagccaacaactggcacttagaagcatggccccagccagcagccccagggactaagtggttgcttatcactgaaagggctattatgtcctcccagtactattgttgacacttcatgaaaaatatttggagaaaatgttttgttttgattttttttaatagaaggaaaatgtctgtccacagaggaagtctgcagaaaaaaagaaagaaagtgtgttatttaattgcacactcacaggtaaatttagtaaataatttttttcttttcttttcttttttttttttttttttttgagagggagtcttgctctgtcacccaggctggagtgcagtggtacagtttcagctcactgttatcttcgtctcctggattcaagcgattctcctgcctcagcctcccgagtagctgggattacaggtggctgccaccacacctggctaatttttgtatttttaatatagacagggttttaccttgttggccaggctggtcttgaactcctgacctcaggcaatccacctgcctcagcctcccaaagtgctgggattacaggcatgagccactgcgcttggccaatttagtaaataaaattattttagtttaagactgtgtctatacatgagatacacatgcactctaacatctggatgaagaaaggtattataatttcggtcaagtgtccagatgtttccatagtttgtgcagactcatgtgctagctgtgtctgtgttctgctgcaggggagcacaccctagaagagaagccatctcctgcatgcaaagctgcaaacaatctttgcatgctgctcccaatgcaccttcttgcccttttatgctgggctgaggctctgtcctcctgttgctcaacagcaggcacagggcctggccactgttgaacaaaagctccacgtatgcatgtttaacttccaaataaactctgaattttaaaattgatcttagtcttataatctgcttctaagtgagattttctggattttttattttctctgtctctgatactcttagaggtataatttggatagggtcaaagttaacctacagttagtgtaactagtacacttaagaataaccaaaatacagcacaacatatggcatagagaggtttttaaaaacactttgcattaagtcattaaaaaatcaattatataaaaaagcaaggttaaataattttctcctctatcagtgggatatagacttctaatttcttggtgttaaattctacattgaatgacttcccctgtgatgtttggcacttcagtgaggtcacagaacagaaaagaaaaaaaaatcaatatcactggaaagcatatgctacagaatgaactaactaaatattaactccattagtgaaaaaaaaaggagcaagtgcaagattaactaataccagtgggattatagtaaactaagagttatggcaaactttacaattcatgatcaaaatttattgcaaggtgcatacacgttgcatcttgaatcagtaaattaaatatctttgattagtgcgtctcgagttcatttagaaagctcttgagttttagaactggtcttgtgagttaatgctgtttaattttttttcctggacattttttcattgcccttctctatctccttgagttctatatttttaacaatcattagtaagaaggaaacgttcataaataaaaataaacaaatatctgaaataaggaaactatttaattttgaatccatgtattgaaagacttcaaaatacattgtacataactaaatgttgctagtaaactagagacaggaggttttatcaaattttataggtacattaactgagaaacaaaatagtttaagggtttacctaatgtcacctagtgagggaattaaaactcagatctactagtctatacttcaaagaatttttcttattttttgcttttttttaaaaaaatcataagcatgttcaaaaatagaatggaataatgaatcagagtgcttcatctgctatatattcatgagaagtgtaattgcttcttactattctcagaaatctgtccatagcatattaagtacactagagaatcataccagtgaaaatcaaattgattttaaaacttctatacatataaaaagatgcagccatgctcacactgcaatggcaccagcgtttctccagtgaaggggactgaaaagtggggatgactccactttacctgatttccttgacctgcaatagctttgagctgtcttaccagcttaccccactgcattcaatttcaaatcacttaacttcactaaagttattcaaaatggaaatgcaaaaccttactctgggattgcaattggaaatactgtcatttatatttttgagtaggtaatattttgatgaaactaccatcccccttatctatctgacttgggtctaattttaaaggatctatagataaaagttctcctggcttttgggtaattttggctgcttgagaacttcatgtttggtccctcaattatacagaattatatctgctgtatgtaaggttaatgaccattaacagggaggttttaaaaaaatcatttaaaaatgtaatctcttcaaaattaatgaaaagtaatagttactgataaggctgacagattaaagaaaggctaaacttaattaaaatgatgaactaaaatatcaactggaacaaagtattgttgctaaactgaattttttaaagggatcaattaaatataggtctatatctttgttcagagaaaggtcatagagattttctggttaactatatttatggttgccacgggagtgaaaaattcctataaaaatcaaaaattgcataccgacttatcaggcagtttgaaaagacatttcgttctttttttgttatagctatataagcatagaaataaaatattgatattttccaataataatggttgaattaaacattggattggctaaagggacacagggttatataaatcttatcagatggttttttgtgtagactacgattatagtactcatactgccttcttaggtaatctgtctcctcctcttgattggaagcaatgtgagggcagggactcgtattgatttctatttctgaattcccagagtctaggaaagtacttattatacagtaggcattcaaagatatttgtggagtaaataagtaaataaacaaatgaatgctatcatgtagataacggttgttacatgggggaaaatatcttcattaatgagtaaagaatactggataaaacatttggctgctaccactccaaagcagctaatcacaagcgctcataatctctttggctcatctgaatttctgacactttgccaaataaatggattctcaggatctgaccacaagtaaatacattaataccaaaacataggtcacttgggccccagtctgggattttctcaaatgtgtatttcaatctgaggaccacaagctaatcttttctaaaagcaatggcagctgacggtgcaccaagttaagtcccacacagtccaaaccctttaaacacttactggtgtttaaaacatttccacgtgctaagcaaaaaacaaaaaacaaacaaacaaacaaaaaaaaaacccataacgatgaagttcttgtgacccaagattccaagataaagttaacaaagtatagccttcacctgaaatttgcttattttgataatatatttttatcccttccatgtttcacctgtctcccattcaatacaggataataagattgtataacctcctactacatacttcccagaataatgtgagaatgaaactgtgatatggaaaaatcaatgtggaacaagtttctctgggaatctgtatcaaattaattattgtgaggtagggactagcaatatttcaatagtatcactacgtgttattaccaatataactattgaccgcactgccctgagctccaggcactgtggaatttttatatgaacaccgatcctgactgtacttttacttacttccttttagcatttatatttccatcttaatatcaaacaacagtagataccatggtttttatctgcttggctatcattcttaaggttctgatggcttgttagggtttactaggtcaataagcatggggaaaacaaacccctcttaaagccaggaatttgttttcaaattccatccaaatcagaggaagatgaaagagagaaattcagtttttaacaaatatacagagactattaatatacatgaaatgaagagaatatagctctgtgaaggacttagtttgttcaaatatatttattaatagattgcttgtgggtatgggtatgcatggttgttgaaatgttaactgaaaacttcttaaaaaaattatgaatgttagctgttaaatgcagtgtaggaaattaaagttcctaaaagtaaatttcagactgtgaaatttggattttctcattaaatttatagaaaatattttaaacattaaattatcccataattttgtatgaatcattgttaccccttgaaaagctattgcacatgttccatcttttatagcatatttacaaaaatttttacccaaatagagttcagcagaagtagacttatgaagattgatatttatctagtagataaacgaaattcagggttggggtaaagtttgatgtctgtctaaatgtgttattttgtattaaatacatgtatataataatttgaactttaatattaccaatagccgactccaaggtaaaaatctccaaatgtaggaagtcaaaaacaaattaaaactaatgtgtgtaaattacaatgcactaattttaacaagcgactctaaagcttgtcttaatactggtgaatggaaagcaggtttcacatcctgcctctgaatgggtcatgttatttaaaaaatacacagccattgctacatgaaagttttcttattttattcaactttaggctttacgggggcttgctttcaaaatggggtcatacataagataaaacaaaacaaaataataatccttccaaattaagttcttgacagtgccactgagatgtgacattgcttttaaactttctttctgagctttgtctgtcttggtagagaggaatgggaattctctaagtgctcattggtcgtacaagacagacctagcaaaggtctccaatccacttcagcagctgaaacggccggaggtgatttgcattcactggagtacatatagacttcccatctgtggtttccaggcatgggagaaattgggctacttttaaatctatttttagatatacagagctgctaaatatcatttgatctgggactaaggaatgtttctaaaattgttttttcatattcatgaatgtgttgtttccagtggctattaatttctacacatatcaaacaaacaaaagcaactgactatctagaaatgtctgggaaatggcaagatattacagaatcaattgaatagaattataaacccttttttgtgtgagtgcatgcaaatccattagaaattccttggtagcaatgctttccatttcaggcctcaattttgtgaaatatcatactagggaggaggtagttcctggaaaatatcattgcctttgtgactttagagtgtaacaggaaaatctacatttaataattttaccacattagacacttagggcaaatttgcaaaagataattttatgaattttcaaaggatataaggctttaatatgtggaagtgataataataaaaacattcaaaatgtgctaacaaacaggtaatgccataatgcacaaaatgatagtattgtgtattatatgtagacttgtggccactaaccaatgatatgctacaaaattattattaataactcctcagcatcatcaaccaaaatcgaatattgatcaacacttataccatattcatgaaataatttggaaatatctgatgatatataaagctttcttcccatgatacataaaacattttatttcattaaagtaggtatttgccttttgccattaaaaatattgagaagtttccttatgagaaaataaaaacaaaggtttggagacctttttcattgtactttgccgttatataagattcctttaagatcctattttctttatttctgctctctacaccactctctctctctccctcacttcctagcttgctctctctgtctcatttgacaggcaaatttgcagacattgcctcaggataacaacctcgtttgacagtcaattaaccgtgaatagtcaaagccaaggcagtttgcattacataaatggaaaattagattcctttttcccaagaaacaaaaccctctccttaagacactgcaatagacaacttagtatcaaaacttctaatcacgtctttcccaaaccccttggagacatttagcaatcagtaaaaggtggtttcatttaatttgtataatgtaatttttgtaaatgtattatacattttgtgtagagatcattatcatggagataatataaatgttggcatagatgtcataaaacacctttaatgtctttctgacagatattaaaagcaataagctgtgatcctttttaatggaaggtttctaagagaacatttcaattattgtcattttatgcttttccagcctgtttcattgtgtaacctgatatatttctgaattttcttctgaaatatgcccagcaattaataatcttattgctattaatgtcactgcttccccatttgtgtttttcttagttatatctactaggaattgttttttatttttacccttgtactaaatattcagtcttttgattatgaatttcagcccctctccctgtcatctgactattcattcctcttatttgttcccagcctacctgatctttctctccaaaaatctcctccagaagcatcagagtctgtgatgaaaaagctatgctccttgttcttatctagaaccaaaacaaaacacaaaatctgcaagtgatccaactgacaagaggcacacaaagatccaatttttttttttttgcagggaggatgctacttattatatctaagtttgagagctattaactccaaggagaaacaatcagaaggctctaggtattctccaaaaatgtggcaactattcagagaggacaaagatatctaagaattttagcatatatttatgtaactgtgtatgtttagagggcagacatcattcaaatgcaaagaagtatgctgagattgtgagaaatggcactgttatttgggaaactgtcatcgttggcaaactatagaaatgttgatctttgaaatataaactctgatattcaaaaacaaaaccaaaaaagagcccacaaatcaatggttaaaaacagaatggtggtagtgggtaggtgaggaggctgggcataagtctcacagaaatggttaaatgcaggcaagaaaagtggcagctgatttttttttttttttttacctgaaaagctgttgtcatcctttgtagatacaattacttggttattttccttagttttctgactctgtgtggaaaagaattagacatacaaatcaatgcccggatcaaaccatatgctaatgtcaacagtcagcaggaagaagcatcaataaaagtgactccatggagcctcaggagacatcattttttgacgattattctttgaatacttttttacttaaatacatgtgtatgactacgtatatctacactattatcctttaagaagtaatacagattaatcagatatatgctatgttatttacagaagcataggcatatgcttctgtaaataaacacaccatgttatctgtcaaatctacacttcattaggacagattcacttcgccctaaagtcctccagagtgttttctgtgcacacgtgagtgaacactgaatgttcagtcatttaaatttaactttggtcttttaggggtcccaggtagtacttttcagttggtacttttccgagaagagggtctatactgaagatcctgtcttttgtttcactggacacaacagttgtgtccattctggctaaaactgattaaagcagttaaaactgcatttaacttttgaagccaatgcattttttacttttggtcatggtggaggggaggtactgaactatagagaagaaaaggggtagggtgattcaggctgctccggtgttgtggtcttgctccttttaggggaacaaatgtgctcagttggagggcaaaggggattgttggattagaggaaggaccaggtcaattaaagggtcttttccaacttccacaagcagccagctgaaatataagagggaaaggcggccccaaagcctttgaaaggcgttatcaagaaagggaccagaaaccacatttttacggaggaccactggcaggaaagaagccctcctaaacacactgaatatttcatttctgtggggaaatctggtgattcatctttcctgcgcatatgtaaccgattcagcctaaaggtgcatttaaataataataattagcttgaaggagcctaaaggggatatttacatctttgtaggagggctgctcctccagtgatggatggtgaactgggctgcccgggctgctgctgccgccgccactcgccttctggggggccaggggcggcggcgggggcgggggcaggtccgagccggggtccccgagtttcccgtcttcctgcagcagcctggaggagttcaggccgagcgggaacgcgcccgcgacggccggcgcgcggtcccggctgctccccttctccgacggccctcggccctggaggaaccggccgcccccgactaaggggtcgccgagtaggacctccgtctcctcgtcctcttcctcgtcgtcgtcagggtctcgaccttcctcctcttcctcgccctcggggggcttgtggccctccacgtccacctcctgctcttcttcctcgtcgtcctcgtcctcggagctgtcctcgctggggtagcagcagctggttcccccgggagacagaaggcctcggtggtgcgggtgctgggccagagggggcggcgggggcggcggcggcggcggcggcggggccgggtggtggcgctcggaacccggctcgtcgggctgcgggggcagcagcagaagcggcgacggcggctgcggggggtggtggtggtggtggtggtggtgagggtggtgatggtggtggggatgcgtctgggccgagtggggcgcgcccgccgacgccccgtgcagcttggccaggctctccgcgtcgtccttgccgcccactggccggaaggcgctggaatggtggtagctgccaccgcccgctttgcgcccctccagaaggtgcggatggtggggcgccggaacccgggagcccgcggggccagacccggcggccgcggcccctgccccggcagctgccacagagtccgcgggcggcgtggagcccgcgctgcagtccccgccgctgccgcccgggggcgactcgaagagcgcgtcgcgagagccggcgcccccggcaggaggaggtgggccggagcccgggccgttggccactacctgcgggggctgccccggcgggggcgcggcctcggcgctcccagcagcaccgcctggctcagccaggtccaggaaggcctggcgcagcagggccgggctttcgcctagcgcgcagcctagcgccgagggcggctgaggcgggggctgcaggtaggtgggcaccgggagcccgccaggggtccgcggcggccagaacatgcagaagggcggatagaaggcgtccttgcggcccgcgggccagaagaggccggacaagccggccttgggcgccgcgcccgcgccgcctgcgcccgcgccccccagggcctcagcggcggcacccgcatcctctttcttatggcacaagctgaaggcggcggccgcggcagggaaggtgtaggggtgcgggaagagcccgccgcagcccgggaacttctgcaggacgcccccgaacgagcccttgctgggcaccgggatgactgggtagctgcgcgggcctttggcccctgccccggcacccgcccccgcgcccgcgcccacgcccacgccggccacacagccacccccagcgccgcccccaccagtccccgcgccgcccgaagcagcagccacagagaggctggcggctgcggccgagaggctggcggcggccactacggcggcctcctgcaaggagtcgtcgtcgtcgtcgaagcgcggccgcttgtgatgggcgtgcggggcaccagccagctctgccaagggcggcggtggcggcggcggcggcgggggcgcacccagcaggtgggggcccagcagacccccgcctccggccaccgcggccgcggcggccacggcggccgccttcacagagctgagcgggtggcaggcggggtgcgcgcccggctggggcagtgcgcgcttgcggctgccgccgttgaacatggccttgacgtcctcccaggcgaagaccagctcgtcctggggactcttgtcggtgagcttgagatgacggcgccacgagttgaagttggctgcgtctggctgagtgtacttggcgtcgggcgtgcggtgggagtggaaaatgaacttgttgggcgagaagtacatgttgcagtagctgcatttgatgcacttggcgcgcgagctgttgtagcgcgcgggaatgaagctgccgcggcagccccaggcgcactcgtgtgacacgtcgaaggcgaaattgtctggcagcttgggcggcctgttttcgcccaggaacgacttgcacagacgctcggcctcgcgtttggtgatcatgccgcagcggcgcgatgagatgggcatggccccggcacgccgcaggatctccagttgcaccggcgtgcactgcacacacgtgatgcccagtgccacgcgacggttgtggatctcgttgtagctgaagttcttgagcagagtgttggagatctgcgccaggcacaggcgctcttgcccgtcgatcaccaacgacacgatgggaatgccgtagaggatcacctggcccacctggttgggtttgaggttggcgtgccctggccgcggctggctcagcgtgtcgggctggaaggcgctcgacggcgacgccagcaggatgtcgttgggccctggcagcggactggaagccat

SEQ ID NO: 97 - DNA, 20043 bp, Homo Sapiens
aggcgtgagccaccacacacagccaactgcagggacttctataacccataaaaggaaatagagagaatccgaatctcttgtttttacattgtctccacactcttgagggctactcattttttttgttttgttttgttttgagacagggtctggttctgtcacccaggttgaaaagcagtggggcgatctcagctcacagcaacctccgtctcctgtgctcaaaccatcctgccacctcgacctcctgagtggctggaaccacaggcatgtgccaccacccccagctgatttttgtatttttttggtagagacaggatttcaccatgttgcccaggctggtctcgaactcctggacttgagtgatccacccacctctgcctcccaaagtgctgggattacaggcgtgagtcattgtgcctggcagggctagtagtcttcatgaaacttcatgtgggagtagaatgtttcttgatctgagaagattttcccacagatgctgcatgagcagccatcatcctccttgtgtgaacgccggacatggctgtcatgggcagcatgggatgcaaaagatttaccacagtacttgcatttgaagggcttctccccggagtgctgcctgatgtgtgtgcggagtatgctggaggctgtgaacctctgcagagaacagaaatacagaacacaagaaaaagtcaacttccacgagctggacaaccaattaaactaaggggtaaatttcactgttgctcatccttatggacgaaccttgggttttaaggccatagagcactcctggtcatcatcagtagccttaatccgaaaggactccactgatgtgtccttctggctagttttgagaagcactggatgttagaacagtggttcttcaatggctagattatctggaggtccagtttgtaaaaaagcagattgcaggctgggcgcagtggttcacacctgtaatcccagcactttgggaggccaaggcaggtggatcacctgaggtcaggagttcgagaccagcctggccaacatggtgaaaccccatctctactaaaaatacaaaaattagtcaggcatgctatcgtgcacctttaatcccagcttctcaggaggctgagatgggagaatttcttgaacccaggaggcggaggttgcagtaagccgttattgcaccactgtactccagcctgggtgacagagtgagactctgtctccaaaaaaaaaaaaaaaaaaaaaaaaaaagcagactgccagcctgggcaacatagcaatacctcacctctacaaaaagtaaaaaaattacctaggcatggtagcatgtacctgtggtcccagctatttggaaagctgaggtgggaggataacttgagccagaaggtcaaggctgcagtgagttatgatggcaccactgcactccagcctgggtaacagagcaagaccctctctttaaaaaaaaaaaaaaaaaaaaaagcagattaccaaccccacccaagagagtgtgacccaataaatctgacatgagacccaggagcctgcatttaaacaagcaattctgatgcatgtgggtcctaggatcatacttcaagacaaacctcattacagaaagagaagctaatatcgaccagaagctaatatcggccagtgtctttgcataagtcagtgccttactggttttcttcttcttcttcttctttttaatttaaactttttgagatggtttgtaggtttgttttatttgtttgtttgtttgtttgttttgagacagaatctcactccatcacccaggttggagtgcagtggcacaatcttggctcactgcaacctccacctcccaggttcaagcgattctagtgcctcagcctcccaagtagctggaattacaggtgcactatgatgcccagctaatttttctatttttagtagagatggtgtttctccatgtcggccaggctggtttcaaactcctgacctcaggttgatccacccaccttggcctctcaaagtgctgggattacaggtgtgagccaccacgcccagctcagtggtgtttttctatgcccattattttcattctattgacacacactttggaggtattagttgctctaatctggtagactcaatgttttattccttttgagaggcttagaagtagctgtaggacagcctctactccttttacggctttactgtaaaaagcgtaaatgactcagtgactgaaaacataatctataccagtgctttccaacaggacttgctgcaataatgggaatattcattacccacgctgtccatcttggaaatcaatggccacatggagccattgagcacttaaaatgtggctaatgcaacctagggaacggaatttttcaactttacttcgtctttactaattgaaatagccacatatgattaaccgcgaactgcacattgggtagcatagagctattttggtgtaatatgtctaaagcgtggtcaacctattgtttctattatagcaacctctaaccacatgattcatctctgtttttacaactctgtattctgtgtaacatagactagatgccgcttctgcaatgctcctatagaaaattacatcagtagcatccttcacagattaaagtagtaataatagcagttaacattccagtagtacttttatgttatgccaggcactgttacaagagttttatatactttactgatgttatccaacaacttggtaaagactattctccccagtttatcaatgtggaaactaacaggagttcatggacttgctcagggtggcacagctaggtaagcaccagaggcaggatttgaaacttggccatgtttgtgttcttaaatactatgaaatagtgatttttttttttttttttttttggagacggagtttcactttgccactcaggctggagtgcagtggcacaatcttgactcactgcaacctctgcctctgggttcaagtgattctcctgcctcagcctcccaagtagctgggattacaggaacgtgccaccatgcccagctaatttttgtatttttagtagagatggggtttcaccatgctggccaggatggtctcgaactccctatctccaggcacctgcccacctcagcctcccaaagtgctgggattacgggcttgagccaccacgcctccccaccccctccttttttttttgagacagtgtctcactctgtcacccaggctggagtgtgcagtggtgcaatcttggctcactgcaacctccacttcctggactcaagcaattctccagcctcagcctcccaagtagctgggactacaggcataagccaccgatgcatggaaaatttgattataggtgtgagccaccacactcagctagtgcttttaaatactatgtaataggtcatcaggtccccataaatttggaatgtattttattacatgtactctaaatgccagcttggcaataggaggttggttatatttgaccatctttagcaaacttgagcatatttaggggtggaaatgaggactgggctgatatttgactaacatttaccaagaactcattaagccaggctttgtttcaagttcttatccatagacactcaagcagagctcaggacacatcccttagtaagaggttccatttaccttagtacaatacacacactggtatggtctgtctccagagtggactcgcatgtgtttgtttaggctggaagattgagagaaacatttcccacatgtagaacactaaggtgaaaaagaaaaatatagttgaaatcacaccttcctctaacaagtccatttcaaccttgcgtttacctggggttagagaagaactcttttccaatttttttcttttttttttttttgagacgggatctcaatttgttacccagactggactgcagtggcacaatcacggttcactgcagcctggaactcccaggctcaagcgatcctcccacctcagcctcctgagtaactgggactacaggtgcgtgccactaagccagctaacttaaaaaatttttttttgtagagatgaggtctcactatgttgcccagccttgtcttgaactccaacagatcctcctgccttggcctcccaaagtgctaggattatagccttgagccacggcacccgacctgagagaactcttgcttcagatgtggaatgtgggaactgaacaggtttgtggtatatggcagaggcctgaattagtcctgctctctcaacaggtagctgtgtgactacagaacattggttaaatctggaatcttagtttcccgatcttgctcatgggcaaaatacctgctctgccttcctcacagagctatgagtaaactacaagtactgtgcaattaactcaacaattatctacgacttacagagtacctactgtgtgctccacactgctagaaaccaggagctagaaatcaaggaggggtgacgatgaacatgtaagccaacatggtaatgcacagtagcagattatctgagacgtgttgaacttgcatgaagaggttaatattttgttcacacgctgtgaataattaatattgtttcttgaccctggcaactcctctcgaaactgtctcaggaattctacaccaggtgaagtaaactaccagagaggtgcaagcaccgagagtttgccagggataaagcagaaggcctttggttttgacatcacttttaaggaaattacactaactaaagagaaaaaacaatttttctctgagaaaggtttctgtgctttcacaacctctttccaggcatgcttatggggcagaggagagagcaaatctttgtatttgtttatttatttatttttatttatttttgaggcagagcctcgctctgttgcccaggctggagtgcagtagcatgatctcggcccaccgcaacctctgcctcctgggtttaagcaattctggtgtctcagcctcccgagtggctgggaccacaggtgcgcaccacatgcccatctctacaaaaaatacaaaaaattagctgagcatggtggcatgcacttatagcctcagctcagctacttgggaggctgaggttgggtgattgtttgagcgtaggaggtggaggttgcagtgagctgagatcatgccattgtactctagcctgggcaacagagtgagactgtctcaaaaaaaaaaaaaaaaaaaaagattgttcctccactgtactgtaagagcacctcgtctgttgaagggtaagccatcatctcactatcaccagcttcctcatcagtcctgtcatctactgacctcctggttgacagccctccagtttcttttctttttttttttttttgagacggagtctcgctctgtcacccaggctggagtgcggtggcgcgatctcggctcactgcaagctccgcctcccaggttcacgccattctcctgcctcagcctcccgagtaggtgggactacaggtgcccaccaccacgcctggctaattttttgtatttttagtagagatggggtttcaccatgttagccacgatggtcttgatctcctgacctcgtgatccacctgtctcggcctcccaaagtactgggattaggcgtgagccaccactcccggcctccaatttcaaagagagcaagcattctatacatcttctgtaatttggtttttgcttgataagacaatattttttttttttttttgggatggagtctcactcctgccacccaggctgcagtgcaatgacacagtctcggctcactgcaacctccgcctctggggttgaagcaattctcctgcctcaacctctagagtaactggggctacaggtgcctgccaccacacccggctaatgtttttatatttttagtagagatggggtttcgccatgttggccaggctggtctcgaactcctggcctcaggtgatctgcccacctcagcctcccaaggtgctgagattacaggcgtgagccactgcgcctggccagtaagccataatttatataatcaattttgtgttgatgaacatgcagtctcaaacttttcactatcagaatactggatagttttcacttttgccagtctaataagcgagaaataccttcaccgtcctgatatttttaaatccttttagaattacacaaatgcatgataactgtaaatgtattcaaattttataggagtatataatatagtgattaaacatgacttttccagaagcttaggaaggaagggagaaattaggacaattttatgatgattttattctcagttttcaaaacaggaaaatgggctcaaggtcgtagctgcctgaggtagttccgacaaggccaacagtcaagcaagaatacatctgtgcccaagcctcgtcctccttttaattaagcccaagggaatattgtacttttttgcagcaagcctagcagagcatccaggtatttggaatggctccgtaatgtcattactgattttctgtcttacaaaatcctcggcccactgtagaggccttccgctccttggaaggaccgtgccttcacttccttcttacctatacctgtcaacacacctgcacagatttggaacaaggcgcagttccccaggagcacatgccaggctctctcctgtctggaacagctcgactctttcctgcccaactaaccctgccaccagtataaatcagacaccccatttgtccttctatacttggctcaaggccacctctgtgcatctttcataatccacgtgtccaggtggccgtggacactccttcctccatgttcctccctctgtgggtacctgcatcctaacacatgtgcatcgctgtgcctattcacgcctgcctgttccgtaatactatcctctcctccttcagagagggtgtccgtcaggcatcacagccctgcagctagcacctacaaggcaactccccgtgttcaggagcttgggaagggagagagaacgtgatggtgggtcatgtgtcctcctaatactcaccttgtgaggccggtgcttctcatgaacatgaagaatgtggatccgaagccggtcccgcttctcaaaggatcgtttgcagagagaacagggaaatttcctatcgcccttgtccacacagggggtgtacttgaggtgcttatctctgtaatatttgtaggtaaataccttcccacatctttcacatctgtagccttctgcagactctgtcaaacacagcaaacacaatgtctcttcagttacttccctccctagttccttcaagaggatatttatttatttatttatttttagccaagaattctttggctacttcaagaggaattttctttttttgagacagaatcttgctgtattgcccagtctgtagtgcagtggcacgatcttggctcactgcaacctctgcctcccaggttcaagcgattctcctgcctcagcctcccaagtagctgggattacaggtgcccactaccacgcctggctaatttttgtatttttagtagaaacagggtttcatcatgttggccaggctggtctagaactcctgacctcaggtgatcagcccctcttggcctcccaaagtgctaggattacatgcgtgagccactgtgcctggtcaagagaattttcttttcttttctttttttttttttgagatggagtcttgctctgtcacccaggctggagtgcaggggtgtgatctcggctcactgcaacctccacctcccgggttcaagtgattctcctgcctcagcctcccaagtagctgggactacaggcacacaccaccacgcccagctaatttttgtatttttagtagaggtggggtttcaccatcttggccaggacagtcttgatctcttgatcttgtgatccacctgcctcggcctcccaaagtgctgggattacaggcatgagccaccatgcccggccgccaagagaatttttaaaaacctttttattacagaaaaatgtaaacataccaaagtgaaaataatagtgtaataaaccctcatgtgccaaacaccaagctttgaccaactcgtaactaattttgttttcatttatatcaccgctcgccatagtagattattttaatactaattcatcctttgactcaaaaacatctaaccgtaatctttagaagatgacatatttttaaaaagcataattgtgaccaggcaaagtggctcacgcctataatcccagcactttgggaagctgaggcaggtggatcacctgaggtcaggggttcaaaaccagcctggccaacatggtgaaatcccgtctgtactaaaaatacaaaattagccaggcgtggtggtgcctgcctgtaatcccagctacttgggaggctgaggcaggagaatcacttgaacctgggaggcgcaggttgcagtgagccaagattgcaccactgcactccagcctgggcaacaacagcaaaactccatctcaaaaaaaaaaaaaaaagcataattgtgccaggtgcagtggctcacgcctataatcccaacactctgggaagctgaagtggacagatcgcttgagcccaggagtttgagaccagcctgggcaacatagtaagaccccatctctacaaaaaaataataaaaattatctgggcatgatagcacacgcctttagtcccagaggccgagatgggaggatcacctgagcctggggaagttagttgaggctgcaatgagcagtgattgagccactgcactccagcctgggcaacagagcaacactttgtctcgaaaaaaaaaaaaaaacataaccataatgtcattgtcacattgtcatacctaaacgattaactcttattcttttatagaaacatatatgtacttatatatgcacatttatatacacacatatatatttgtttaattactttctggtcagtccattcaaattaggcttcaaacaaagtctacatgttgtatatggttgctatgtctcttaaatatcttaacctataggctctctttcccttttgttccttgatatgtactgttgaagagaccattccaccagccccatttaagggcagtgcaaccctgcagctcttgaacacattcctgcctggcacttgttacaaggttaatacactgaggcactgaggccgacctatttctctttgtgcctttaagatcagcctgagttacaagctcagagcagtcaccaggacacccgcagctcacagtgctgttctattctacacaattcaagggaccttcttagtttatacttcattactcaaaacttgtggcagattccagagctagaatctttatgtatagagtaaggttgaaagcatcttgacttccctaatgcacagggttaccgtgatgactaatttaattctaacacttaccgagtcttaccaatgtgagtgatactatcactgaatggcagacaagactgagaggtaaatctgtttttatcaatggaggagggaggaggagagaagttagagagggtgcagctagactctagcaaagcaggtcccacgtccaggggtgtctatgtgttgggggaaggcgagagaacaggggccacctacaaaagcatccctgcagaggacactctggatcccagaggataaagtggctttgactatgaatgcaccacagagatctcattgtttgaccccagggaggaagagcagccaagagtgagtctatgcaagagtctgcagatagaaatcttctcagcatcaggacagcagggaagctgtccatcaggggctttgttagttgacaactacatcccaggcacgtttaacaggtggctaaggaaataaactattcattaagtaaataaccaggaaggcaactgccagccccaagctgatccatcgccctgctctgtctatcactttcattgaggtgctaatactctcagaatccccgtgctgggacacttttttggcacagaggtagaatttttattggtcagaaatacctggccttcctgcttcctggggtgggaagggaagagagggtcagcaattttacaaacctaagcactaaagcacaccaaaattcagaataaagtttcaatactgagttcgcttaagaacaaccacttaggtagaaatgaaacctaatttcatcttgttccctatccttcctaattttatcttgttccctatcctccctccccctagctcttcacacctccacaccccaaaacacacacccaaattccctctctccctcacaagaggggaatgcttgcatattcaaataacccgcccacatagagtctagacccttccctcaccactcaagaccttaaagaggaaggctcccacctaccaccaatccccaccaaaaagcctttggggaaaaaaactcatttgagaatgcaatggaattttaatttttctttcctttttatcacatccaaaccattcatattaacagattaacaaattaacattcatttataattattcccaacaaattaagttgtttacaagtttccctccattgtccaaaatatatgtcctcataataatgctgtaagcatcaggtatcacttggttcagaactggaacacaagtatcttatctgcatgctgggtatcccctgcacttaaccatcataagccctcattctgttgcttgctctgattgcctctgatatcggcatactattccatgttaataacaaataggttgagtatcctttttctgaaatgcttgggaccagaagtgttttggatttcaggtttttttcgaactttggaatatttcatatacataatgaggtatcttggggatggaaccaaagtctaaatataaagtccatttatgttttgttttatacatactttatacacatagcctgaaggtaatttttttttttttgagacggaatcttgctcggtctgcaacctccgcccccggtttcaagcgattatccggctccagcctcctgagtagctgagattacaggcatctgccaccatgcccagctaatttgtttgtatttttagtagagacggggttccaccatgtttgtcatgctgttctcaaactcctgatctcaggtgatctgcctgcctcggcctcccaaagcgctgggattacaggcatgagccaccgtgcctggcccacctgaaggtaattttacacaatattttaaataattttgtgcatgaaacaaagtttgtgtcaagtactggtgtgtggaaattcccacttttggcaatatgtcagtgctcagtttcagattttagagcattttggatttgggatttcttgattggagctgctgagcctgtatcatcatttacttaattattatactactgaacatttaggttgtttgtgatttttcactcacaagagtggtgccacagttaaaaattttcataagcatagctttttccttttggactatttctcgataatagatttccagaagagtattactgagacatcaaagttacaaacattgtaataatttgatacatacggtgaaaaaatttctcaaaaatggccggccatggtgtctcatgcctgttatcccagaatttagggaggccaaggtgggtggatcacttgagtccaggagttcaagaccagcctggccaaaatggcgaaaccccatctctactaaaaatacaaaaattagctgggtgtggtggtgcatgcctgtaatcccagctactcgggaggctgaggcaggagaaatgcctgaaccctggaggcagaggttgcagtgagcctagattacactactgtactccagtctgggtgacagagtgagaccctatctcaaaaaataataatgatttctcaaaaggataataaccatcttgccagttactaagcagatacttttctcaaatccattgttcacttttctttctttcatttttctttttgagatggagtctcactctgtcacccaggctggagtgcagtggcgccatctcagctcactgcaacctctgctcctgggttcaagcgattctcctgtctcagcctcctgagtagctgggattacaggcatgcaccaccacacccagctaattttttgtattttagtagagacggagtttcaccatgttggccaggctggtcgtgaactcctgacctcaggtgacccaaccaccttggcctcccaaagtgttggggttacaggtgtgagccaccacgcccagcctgttgacttttatttcgaaaggagttggtacatttcaggaagtgaccaacaggtcttggtttggtgctaagtaggagacaacttagagctccacagatcatagagaatcccaaccatttttgcctccattcctatcttcacctacattcccacacccacaccacccaccaaaacacttctggtcccaggcatttcagaaaaaggatactcaacctgtatgcagatatcagaggcgatcagaacaagcaacagaatgagggcttatgatggttcagtggcggggggaacccagcatggacataagatacctgggggagtaggaagatagttcaccaaaacaatcctgacagcccctcatcattgggaccattatttatcattagataaataatgacggctgactgctcattatttatcattagataaataatgactgcttattatttaccccctaatttctggacatttccttgccttctgcttcactgttccctgagcctgattgccttccctctctccctcttacacgtgccttatttcatctcatccctaagcagctttttctagcttagttctaatgtcttcctctcagtcagtacgcactgggatccagaagcacgagatactaaagtgtttagggttatttcctgccctgaagcatctcagcctagcaggaaaacaggcatgcagatgcaatttactttttttttttttttttttgaaacggaatctcgctctgtcgcccaggctggtgtgcagtggcgcaatctcagctcactgcaagctccccctgctgggttcacgccattctcctgcctcagcctcccaagtagctgggactacaggggcccgccaccacgcccggctaatttttttgtatttttagtagagaagaggtttcaccgtgttagccaggatggctatgatctcctgacctcgtgatccgcccgcctcacctcccaaagtgctgggattacaggcgtgggccaccacgcctgggccattttttttttaaacctgctccttacacatttattacatcataataatttgccttctctctctctctttttttttttttggagacggagtcttactctgttgcccaggctggagtgcagtggtgcggtcttggcatattgcaacctctgtctcctgggttcaaatgattctcctgcctcagcctcctgagtagctggaactacaggtgtgtgccactacgccccgctaattttttgtatttttagtagagacgggttttcaccacgttagccaggatggtcttgatctcctgacctggtgatctgcccatttcggcatcccaaagtgctgggattagaggcgtgagccactgtgcccgacctgagatgaggttttaccatgttggccaggctagtcttgaagtcctgacctcaagtgatccgcccatctccgcctccaaaagtgctgagattacaggtgtgagccacagtatccggcctgccttctctcttatttacaggaatttacatttatcttgtcccacctactagattagtagttcctaaacttcagtgtatatagaaatcacttggagagcttatttaacatgcaaattccaaagtctcacccctagagtgggctggtggttccctcgccccttgctactggaatgtggaccagggaccaggaccagcagcactccctgcaagttgataaaaataccaaatcctgggcccctaccctgaatgagaaccagcatcatgaagatccctgggtattcattcccacattaaagtttgagagtgagagtccagctcagtatttctcaaacttgcctgagacccatagtaggcaatgtattttatgcttgacacccaccatacccacatatacccatgtgaaatagaaatttcacaaaacaatccttactcttaagggattcccatcaatattttctattctactctatacttttttttttttttaatgtgggtcttgaccactaaattgatttcccaccccactaagacatgcaactctgcaacccaccatttgaaaaacactgctctagtgattagacttcagctacattagcctgggcagagatgaatcagaaactggctcacctatggtagaagttacatccatttagtacgttttcttttactcttggggtggaaggtagggaagaagaacaagtctttataaataggagtatatatctttataaataggagtagcttccgcagctttgggaaattgaggatgctttccttcacctgggtaattcccccctggttagagacactctcggttagtcctctgcattagcctttaggagggaggagctgtgcatggagggtttgtggaaaagagcccagtccttctactgggatgccctcattgggcaaggcgagggtgtgcactcaccttcagagggcccagatggctgcttccccggctctgtgacctgaaggctcacaggaatatccagaaatttctcatagcagtctccataccacacaaggagctcttggttctgatggatctctttgcagctctcataaaatatatgcccttgacactgcacagcaactaggttctgctccttggggaagcgggcacagttgacataggacatccagttccccgtacctccttttccatctataaagtggctcaaatgaccatcttcaaagatctaaatgaaataagacatgaagtttgtattgtacttcttttttggtctaatctataaaataaattttttaatacttgtaacctaaatatcacacttgagtccaccaaatacacttctatcattctgatttttatgtcattacaagtagtttataaatttacttatgccaacatagatttgttagtttaaggacacctctctaggtaatgtcacatattgggtttgtttgtttttttcagagacagagtctcactctgttgcccagactggagtgcagtggctcaatcacaggtcacagtagcctcgaattcctgggctcaaatgatcctcccaccttagccccctgagtagctggaactaaaggcatgcaccatcacgcctggcaaatttttttaaaaaaattttttgtagagacagggcctcactctttcctaggctggcctcaaactcctgggttcaagtgatcctcccaccttggcctcctaaagtgctagaattacaggtgtaagccactgagcctgcctaatgtgacatattctaaaagattcttacttttatcactttcttgcttcccaaattcctatagtgagcacatgttaatttcataagcagaggtaagtgaaacaaaaaggttttatttaattccaccacttaaacacaactgaatagttttatattttactcccagttaggtttcatgcatattaatggagctatagattatttctttcaaggccgggcctggtggctcacacctgtaatccccgcactttgggaggccaaagcaggcggatcatgaggtcaggagttcgagaccagcctggccaacatggtgaaacccctctctactaaaaatacaaaaattagccgggcatggtggcacatgcctgtaatcctagctactcggaagactgaggcaagagaattgcttgaacccaggaggtggaggtcacagtgagctgagatcacgccactgcactccaacctgggtaacagacaaaaactccgtctcaagaaaaaaaaaacaaaaaaaaaaaaacaaagaaagattacttctttctctgctgctggcaatttcgctgtctccaacattttgttattataaacaaccctaggattaacatattccacatagcctcaatttcagattattttcctgtactatattcctagaagtagaaattcagggtcaagggactttgaacattttaaggtatctgatacattctgacaaattttctcctgcaggtaataaactgcagtcccactagcatatccctaatatatcatcactagatcttgaagagtatctggttattttttttttaatccttgactaattttataggtgaataatattgaattttaaaacttgtttttattctctttagcatagtttcagcactctataatatctaaagcatttagttttgtctataaatataatacaacatattgattctttaaatgtatattccattgctaatcttccagactaaaatgacttaaggcacccacaaaacacagaattcatgcagaggtgctatcctcatggagcaaacactggccgttccttccttttacaggcaacacaaaccacagatatctgccctggatgtcctctctctctgaccaggactctcccaaaagggcaaaggccaagatttccccggactagtctcccgccccattttcagcagcagacccaccagaaacagatttacctcccacatcacagaattgtctccgtaggtcttcacttcactggcattgaccactttaccttgaaagggcccaaacctgactcctttggcgataaaactactgcagaacacaccaaaatgtgggacttcaccaaacaccgtctgcatgaggcatagacctaggggaaagccgaggcaggaaaagagaatgaggagagttgactctgcattagttcagggaaagaaatccatgcaaggagtcctgcctaccttctggaagttgaagggagtctttatccagagtttgaggaagagaatcagatcctagcaaaaggcaggttaaaacaatttttcattaaaaatgcattataaagtgcttttatgaggtgtttccctccttaattccctaaaggtaaccatcatcccagtttgatatttatttgttgtttctatttttccctgctcattttacatggtctgttcatacacgatttcactgtaaacaattccatatacaatttctcatttgagactcagaacagcctcatggaagtttatgtaattaaccccattaggcaaattcaaggaatttgaggatcagaggtaatgcctgactaaggtcagcgtagctagctgagctgggactgttaggtgtgaactgctgaaggctgtcattgcatgttagcatagaatctgaacctacctgggagttcgctgcaggaaccatttctctcttggtcctcagctctcactaaaaccaaccttagtcatgcagttaagcaagcagggcctcagaagtgagcctagaacagccctggctctcatggaggtacttcccccttcccgcactctgcagcctcagctccacctggaagcgcctcttcccggacactcccgttcccgcctgcattcccgtccaattcgactcccaaatggtgtgaactccctttaccagagctgtctggggggaccaggaggcctgaaatcgcatggtgcaggctggctgggtgctccaggctgggagtgaccccgtacagaacgaagtgcaggtcctcctccgtgaactggaaccgagcaggggacttcccttcttggttggagggtttgggaccatcctctgactgcttgctgggtgagcaaggtaataactgggaggtcctcagcccctcaggtaacagagaagcatccgcagggggcggtggaattaaagtgtcaggtccacaacacgggccactctcgttgtcgccaccaatgatttggtggcccagatcttcactgctggcacccgcgtactcgtggctgctgctcaggaagggcggcacttccctggggacgtggggaattgggtaccacggtggcagcttgctgtaccagggcagatcgtagagaggctccctctgtaggcccagacccgggctcagcaagggaggcgccatccggaaggggaaggggggcatggcgggggcagcagacgctgcggcctccagctgccggaaaggttggaagtcttcctccacggtggccaggctgtttctgtagtgtccataggacgggaaaggcgtgtagtacgcggccaggttctgcgggctgctctccggcgggtagcacaccttgtcctgaggcacggcctcacttggccggggtagagccatcccgggaccgcacgctcggcggctctgcagaaaagcgggcgccgctgaggacaccgcgcgggagcttcccggggtccgacccgcgcctccccaccagcctcctccaccccagccagccccagatccaagggaacaggataaacgcccccagtccgatcccgccagcccgctcccacaattaagacaaaacgaaaaaacagcaatagaagcaaacacaaaaaagccccaaacggaaatctgccgggatcctgccctactctaaattccgggttagtgttgccttccccttccctctccaagcaccccttccctaagcccggccgccttcccacacccgctctccgctttcggcccccaacccggttcctgcaaaacccattgaagttccctttccttccttcttctcagtcctacaaaactcgttggtagggtctgtgggagccgcggggccctgccaacctcggggctgggccgggagccgagcgcaggcggtcggagggcaatggagcaagcgacagctccaggcgctcctgggccctcggctgggagggaagagccgaggaccctgggtcgcaccgcgcagatggagacgcgctcccagagcccccgggcaggtccagggaccccgcgacctgctctggcccagcggtgtgaccccgcgggtcctggcggtcctgactgcccgcaggggaggggcgcgccacttttggctgccctaggatgcgccgcctgaacctcttttccctcgcgggcagcgtccgccacattccccgggttcctcggaaactccaatcattctaccaggactattggggcctggggtagcccctcgggagccgcgtggacgagccctggccaggtgggagcgaagagcctcggcgactgccagtcctcccgcccccgcaccgccgggaaaggatggcgttttaatagacaggcagcaagttcaccgaggctgaagaatgaagccccttcagggccggcgggtcttgagatcaatgagcccaataagaaaaccaagcagggtcatgactcagaaattaaagaacacggggtcaggagaagaggtcagccacgacacaggcagcggcccgtctcctcccgatcctccaaaggcgcccttctcctagcctcctccgacctcagggatctgcaacttgggattcaaagcccccgagagggcagaacgaccatccaaaacgaactgcgccagcgagtgctgccgccctccccaacggccctggaagaccaccgccccgggccccaggcgcgtcctgtcccgtgcctacctccgacaccacctccaagagcgccaccgcggagcgggcgcctcctggacgctgcggggccactcgggctcggtaggccactcgggctcggtagacttcgggcgggccctgagggctgagccaggcttaagagggcgggcggggccgcggggcatcgacaggtcgagggtagggaattgacccggcccacgcagatccccgcgtcgtcttctccccgcccaccgcagccattggccgactctcgactcgccctctgtcccctggggtcgctcacttaactcatcagttttccaaaccctccctgggaccctagtggcgagcactcgccgctggccttctagggcaggcagtattgccgctccaggcgtgcggagtcggggagaaaaaaaccgaacacgtgtgctacccagggcccccagataagcccctccgcgcgcacacacaccctgaaccggagtccagaaggccggactcgcgtcccggggtcgagccccttactctccgctcccagttcggaagatcccagcctgcccgaaggcggcgt

SEQ ID NO: 98 - DNA, 7201 bp, Homo Sapiens
gccagtggcgctgcgctgaatgcaactgcgcgcgcccgccgggtgagccagcgatctgagccaggcgggggcggcccgacctttcccgcccagcctgggtcagaggaagccgaaagcggcctcagcaaggtgaggcgcccgaggctgcagaagaccgagcagaactttgcagagttcgggatgtgctgggctaggtcgctgaggacttgactggcttcctccctccttccctccacctaccttctccctccccctccaccatccagtgggttcgttccgggcctccagctatcagctcccgatctcgtgtttgagggtagcgaccccgatttctgtttgcatgcacagccagcagccctagcgccagatcctaaagctggatatcttttaactgggctaccagcccgggcctcaaagttttggtgagtgctgtgatgccgctcggggtgtcagggagggcaaagggcgtgaatcatctttcaccttttctgtgtgacttggatgccttaccttaaatatataaaccaaggcctaagtacagagagcccacgcggctcagccctgtgcacctcaggtactattaaggctggacgggcgtctgtattgtgctctttgcccttatgggacgctaatgacaacaaaattttggttttcagttgagtattttggggaggggggtgagaggacctcttcaagcccaaggaggggtccttgtggtggtgtaggctgatgagaggcatttgggaagcatagagtggtacttcagtgagtctgaagggccacttgtaatcaaaggaaaactgttcttccacggatagttttatatgcatcatggccatactagttgagtatggggaaatccgacaagtggcctggggctgcctatttggacacaatattttgtgtgtgtgtgataagtgagttacccagggacttgtccggaaagcccgtgtaaagccagagagggccacggttaaaggtcaggtactcacagagcacttagaattaataaaataaaacctttgttgggttgtggatccctgggggccctggagatacaggaaaggcacgtgtggcctggaagtgagggacatgtaatgagaacaggatgactcaagcggccggaggcgggcagaccaggagctttgggccggaggctcagggatggtccctgacggcggccggtgggtctttggatttctttgtgtttccccagagtgagggccgccaggctcaggccccagcgaagccccgagcgccatggccgacccgcaggctggctccgcggccggggactgggagatcgatgtcgagagcctggagctggaagaggacgtctgcggggcgccgcggtccacgccccccgggcccagcccgccgccggcggacggggactgcgaggacgacgaagatgacgacggggtggacgaagacgcggaagaagagggcgacggcgaggaggcaggcgcgtcccccgggatgcccggccagccggagcagcgggggggaccgcagccgaggccgccgctcgcgcctcaggcctcacccgccggcaccggtccccgagagcgctgcactcccgcgggcggcggcgcggagccgcgcaagctgagccgcacgcccaagtgcgcgcgctgccgcaaccacggcgtggtgtcctgcctgaagggccacaagcgcttctgtcgctggcgcgactgccagtgcgccaactgcctgctggtggtggagcggcagcgcgtcatggccgcccaggtggcgctccggaggcagcaggccaccgaggtgcgtacccgcccggcccgggcgtctcaggccacagtggaggtgggggagttggaggggagcggggcggccgtccacaccccccgcgcccagggccttgcggtgcctggcactccctaggaaggatggtaagaacgcttttctgcttgcactggcgagcagggtcgggagggaaaaagcaggcatctctggggaacttgggaaatgtttttgtcttaaaaagcaggcagagaggccttgaaagtgtttaggcccatttggaacatcgcgagaaaatcaatgtttttatttttttgcattttaaagtgcattttcgtggtgttgagggcgggggcttggggggagagtggttgatccacagcacggcgtgcagctccaggctcgtcactgctgtactggtgatgatggagaaaaagaaccacgcagcacgcatgcgctcggtgcttcagctgtcacctggacgtttgagatatctagaacactcattttatggatgagacacaaaatgcatgagaaattagatgcctgcagcccaaggtcatcaatccgaagctactgtccctgcaaactacctaagagcaaggggagggtctctgctgcttcccatcggaggactccagctgcgaggagagccagggctttctttccgagagacgctcttgaaccttcgattttgtatttgtttccatgtgcgcctggacagggagagttcagcgagcgaggcttcacagggcctcctcccagactcaggaccagggaagactttcaattttactttttggcggagaggagctggggagtggatcgccagacacactgaaggcagtaaccccactggaaagcctctcgagggcccaggagagcgcgctggacgccatgggcacctggtcctgggcttggtctcctcccgcgtcccgcatgggtcatcgcctgccctgcgttcccacgcgttctctgtagcatatgctgggtaggacgcgggcgtgggagggcccagaatcccaccagctggtgggataggtgactgcagaggcgagggtgggtgtccgcaaagcgcaaatttggagtttgcagccggacccaggagaccctcatctcttcattcccctatcaccccaccctgcctgccctgccacagggagaaatccgcccggcctcactgcttcacagcaggccttgggcaccttctatccgacaggtgggctcccaggacccagcctggctgcaaccatctcttgaggtcgggtgcccccctgaaagggatttcactttttcacttccctccgggatgtcccctcacttctggccataggtctgcgtatatctagagtgattagagtctagagtgactatgctgcggaaagcaggggatccagctcaccagctgaggttccagctccttgccctaggattaaggggtgctgatattaattcgtttgtaattatttttcacacggaatgggaaaattcaatacatttagaagggggagagtttctagaagatttacggacatcccgtccttcccccttctcgcccccattttctttcagggcattattgatgatgtttcttgtgtttacaggacaagaaggggctttccgggaaacagaataatttcgagcgcaaagctgtgtaccagaggcaagtcagagcccccagtttgctggccaaaagcattttagaaggtaaagcaacaaaattatccttcagccttttaaacagagttgagtgactctcattaatcagcacaaagtgtgtttattaatctgtgaaagagctatctaaagggaaagtactttttattagaaaggttttgtttaggtgttcgctgagcccgtacgctaaaactgaacccgtacggagaagattagcatggcccgggaaccagaaagttttcttctaggaaggaaaccgccacctgggaaaatgaatctcacatacctcctgaggtttctgtcaccaccagttgaagaatccctattatttggttgtctgcttagtggttaatcggttaatgtggagtgcatgtgaaatttaccccgtatgagggatgtacaaagatatactgccaagtgatcctggagcagatgtcttggaaggaaataaataacttaaacaaagcaaaacaaaacaacacaaccacgtccacttttcttagttgtgggagctgaatagatgaagtcaagtgaggagtttaacagctgctcgcaaccagtaaagccgtttagtctggaagttcaacctcagattccgctctttttcattgtacttttttttttttttttggattacttggataattcctattattccaaacttcatttttaccattttttgacagtcaaggttatagaatctgaaaaaggtttcgaatccagcaagcgaagtggaggttgaatgcgaacagtgcgaaatctctagctttctgtctccatgttctcactttcgtgaaagcctgggggtacattaatttttcttaaaatattactcatttttaaaagcatctctatttgggtatggaatttatttattgacctcaataatatattgactatttttaaccgtttctctttaaatttttaaaaatttaaataagggacaattaatgtttgctttaatcactgccacttcatgaaattcaggttgaaagtaaacaaaaatttttaagtagacatttggattctgtttttttcttgtgtagcttctgaattttgttggttctggacaggtttgtgtgtgtcctataaaaatttttaagtagacatttggattctgtttttttcttgtgtagcttctgaattttgttggttctggacaggttttgaagtttgtgtgtgtcctatcatgtgttgtatacttctgaccatagagtggtttcttatgaattaaaaatgaatttggttacaaactggataaacagatttataataatagggccacattgataaactgagattatgcaaagcaacttgtgaagtctgaggactaaatggaatagtaaattcaactaaataacttcctggcaaaaacttatcatagaaatgtaaacattaattttcaaattttattttatttgcaaatgagtataatgggtttgtcactatgtaaacacaaatataacaatggatgcttcaaacaaatatgacagaggtgagtgcttgggggtgatgaaatactccaagtattttatgcctccaggaattctatttatgttacactaatctttgtatttgagtttgctcctattcgtgcgatgacttagcctgtgttttaatgattgcttgttcaaccattttggtatccggccaaaatgattagagcttgggaagaatgtttcagaacagttattttcgatagagcagggaatactccccgccttttttgagttttgttttattttattttatttttttttgtagtggtatcaggggaaggggcctggttaaattgttcactgtagagtgtgtttgactagttaacagctcttttcaattttctatgcttctctattttcttaagccttttttttctttttctactcgctaatctcctttaactttctttctttctcttttttcctagttctccttggattattctacagctattatgtgtacataatgaaccatctttagaaaataaaagtgacatcagctctaggtatagatatattttttaataatgaaaaaagatgacatggataataataaaacattgattgatacaagataaatagtcttgtctcttaatgcgtagggggcctgggaagaatattaaaattttaatcaataaagtatgtctgttgaagcaagcaagcaaacaaatccataacaaccacaacaagcaacaagaacaagaacaacaacaagaagaagttgcagtatggatatctttcaccctcccaggaaactctttcaaacctaatctgtacttttgcatctgtataaaaatatcagtgagatggaactgtaaataattgttctgctgatctgtagtgttgctgttaccttctgggtttccacatttttattccgtagatgttaatctctttcatgtgcaatctttgcttcttgtaggctatcgccccattccagcggagacttatgtaggagggaccttccctctacctcccccagttagtgacaggatgaggaaaagaagagcctttgctgataaagagttggagaacattatgctggagagagaatataaagaaagggagatgttggaaacttctcaagctgctgctctgtttctgcccaaccgcatggtgcctggacctgactacaattcctacaaaagtgcctacagccccagcccagtggaaccaccaagcaaggacttctgtaattttttgcccacctgccttgatttaaccatgcagtattcagggtctgggaatatggaactaatttcttctaatgtcagcgtggccacaacttatagacagtatcccttgtcctcaagatttttagtttggcccaagtgtggccccattagcgacaccctcctctaccagcaatgcctgctaaatgccaccacctcagttcaagccctgaagcctggggccagctgggacttgaagggagcacgagtccaggatggactcagtgcagagcaggacatgatgccatcgaaattggaaggttccctggtgctgcctcacactcctgagatccagaccacgagaagtgaccttcagggtcatcaggctgtcccagagaggtccgcgttctccccaccccgacggaatttctctcccattgttgacacggactccctggcagctcaagggcatgtcttaacgaagatcagcaaagaaaacaccaggcaccctctgccacttagacataatccattccactcattattccagcaaacacttactgacaaatcgggtcctgagttgaaaacaccatttgtcaaagaggcctttgaagagacccctaagaaacacagagagtgtttagttaaggacaaccagaagtacacatttacaatagatagatgtgcaaaagacctttttgtagccaaacaagttggaacaaaactctcggtgaatgaaccactgtcattttctgttgagtctattcttaagaggccttcatctgccatcactcgtgtctctcagtgaaaggctgcttaaacagaaagctggattttctgcagtcttagagcattatagccatttgctactttttttaaaagttaagatgtttgtgtaaagaaatttctaatgtaaagatgatgattttgaaaaattttatatattcctaatatgcatgtactttttcttatcacatatatttaaacttacagatggaaattgcccaatgtgcaaattgttaagtaccacactttacacagcatttcaaaaagcaataaaattgacactgtcttctcaaagacccaata

SEQ ID NO: 99 - DNA, 42929 bp, Homo Sapiens
cattaataggagctgtagtctggaagataaagagcctttggtaccgcaagccctgtcatctgtgagtgtggcacagtgaaggcctggagagtcatgacctaggccctgtgaagtcaagtatttttaccaagtaaaaagattggcaataaaacatttccacatagtacatgacagaatacttgtacccatcttattttattggacattaattgcactaattgaggcacatgtacctttaaaaaaatgaaagaagaaaatactcagagaaaggactggtatgaggctgaggaagaaaaatgtgtactgcattctttagatgaagcagaaatcgatcagcaacttaaagtcgcaatctattcaatctttcaacattgcaaattaattctcatttggcttgattgtttgattgaaatgtaacctccgtgttggttcttagaaattcaaaaatatagagattagaaatttggttgatgaaaacctacgggaaaaaaaagcatgtggcctcggcctgaaatgtagaatggacaaataaaatgtttacagtgcaatattttaattgaataatccatagtaatagttgaaataaagtgatacattagactatatttgctacaacataaaacttcataacaagattatgaaagtgatttttattattttggtaatggtgtcccagtataagtaatgagatacaatttttttttaatttggtatatcaaacagtaaaggctacatataaatgttgtttccccagaatgtactttgtctacaactatgcactgtagctattatgcacacactaaaagcattcatgataaagtacaaaaataagaaaagattaaataagaaggtatccttgagttataaatgtctactaaagtataccttttaatcacacagttgtgtcacagctaaaaacacacaaattaacatatactgctatgcaactatttgatctaatatagatctactaggaaaatattaaggctgtagtaacacttcacaggtaaaggctaagttctgggacatgaaagcttttagaaaattcacaaaacaaacctgagacatctttttgttttggaaaaaagcaatttgcttatagagtcaaagctttgacatacaaatgaagcatttaataaacattatactttattgcaataacctggagtaaaacttctgactttaatggttgtcagcaaatacattctctctccggtagaaacacaatgagggtttctgattaaagcagtaatctgattactccagcctccaaattcagttattttcattcgttttttgttttcttttcctttctttaactaggttataagcatattaaataagccaggtaaactccaagcaccttactttcttccatataaacacagctttccttttgccgcaagcatctgatgacgactgggcctacatacgtaaaaacagattatagcacatctggacctggttgacataatgaggcatccagattggttcatgattatttttgcagctacacatttctcaatctaaaaaaataggctacagcagcccaaattcactgtctcagccttggtggggcataatattttggaatggcaagtgccaaaaaatttaaatgtactgggcaagcctgctttgtgtagttgactctaatgcctttaaaaatactggcatgattttttatattcaagaagtacagctatgaaattttaaaataaaattacatgaagttttttaatattccaaaccacaaaacagatctgctatgttgtagacttttttaatagcctatttgagatttaactctgctacgccaaacatctttcttctaaatgtccatgctttgaattttgtgctccaaattaattaattcagaatgagtgggaaaatgtttaaccatctttccttcttttcagtgtttctctcttttctcttaccatccccccaccccacacacacatacacacaactatcaaaaactcccttttttaaaattttggtacaaagattccaaaaagcttaataaaatgtaataagcacttagcacttaggacactgtagaactttctttggaagtttaattgcaatgaactttaaaacttgaaacttcaattcacttttctaaatgtgaatgcatacatttcatttgagctttatgctttcccagctaccaaagtaattgccatcttaaaaaacacaactgacctcatctccactgtcttttccaaacagcttccaagactatcttctgattctgactttccaaaaagcaggcattaatgttaactttcaaaaaatcatctagaagagaaacttggtcagttgtaatgggagttctgtccccaactcttgtcacctcgtaaaaagaacatccaggtaattcatggcattttccattattcattgggcagacacagcttagatttctctgccttccacaggagaatgttcagatttccactaacttcaactggaactcaataatcagaatggctttaaaatttagttaaaatttaagcatgccatgaatttggaattttaatatattaattaggttattttcaaaacaagattctgtattataaatagaatttcaataaagatgttataaaaataagaacacatcttaggatctaattttgagattcgccaaaatttgagtgaagaaaagaaaccctgcttcatttccatgtcaaaaataggtggttgatttaatcaagctcatttttagcacacttggttgcgttagttgtacttttcaattttcaatattatacaaggcatatattattcaaccttttcctgaacaagataatactaatatactgcttacggacagttaagtaatatatttcacactatttggtgacttttttttttaacctatgagacttactgaaatcagtacattatggtcacataatttaaagcttggctggcttttttttttttctttgctgataattcaaattctgtactttggcaagcaaaagaggtacaacatcaccttggagttttacaatttaataatgcatactttaaaattcatgataactcatggaaccccactatactcactaattcaactattgatttctttttgagcaactgactttatgatttatccttaaaagtaaggaagtataccagaaggcaaaaggataaatccacccataaatactagagtctaagttattttcctgaaaaggtgaaaagggaatttctggtctttatcttttcccttatcaccttcaatcacacactttacactgaaattacttgtctctgtctcttcaacaatatactctgaaactttgtttaatatactttttgtctatttctgcatatgggagaccaatcttggattcccaccaaaaatggcctggttaccaaaatactgcttcattcagtagtttggtgtaagtgtttgggtgtatgtgtctatatgtgcattttaactccaaagaatgctaccttcagaaataaccaagatgcagtatgtatataataattcattgggccctttaagtctttgactcaaaaaaatctcccagaagctcctgcatagcccactactcatgaagaaccgctgggtatggagcacacctcacctgatggacagttgatttatgctcaccttaaacgctaattgagaagcagcacaaaagaggaactggaaaaaaactgaattttactcctcatctccgaagatgtgaatatttctaaaatttcagcttgcctcttgcttcttattggcaagtttccttggcttgtaaattttggacagcactatcaaggagctccatggactctctgagagtgacattgactttaaatgacttgggtttaatggttagaccataactgaaattcattttcgcaggctcatttgggttggccctgaaatcgcactggtgagccaggatggagatgaagagaaaaagctgcatcttagaaagttcttcgccaatgcaccgccttttgcccactgaaaaaatcatcactctgctggtcaggtccttgttgatgaggccatccttgtccaagaatcgagctggatcaaagttctccgggttaggccacttcactgggtcatgattcacagaccactggttgacaaaaaccacagtgtccttgggaatgtggtagcccaagacagaggtgttggcagtggtggcatgaggaatagtgacaggcacaaagctggagaagcgcatggcttcataaaggaaggccaggacatagggcaggttgggctggtcacccatacaaggcagacggtccctccccacgacctgatccaattctgcctgcactcgagtctgcacatcaggatacctgtttggtgtttaatgtggagagagaaaagcaagtgagcaaaattcttatttcatctagaaagcacattataatttattttaattccactttttcttaaataggctatctagctcagtgactaaattaatatttctgggaaaaaaatctaaaacagcttcctaatttctcactaaattacaagatggactttaagaattatatttcctgtaataggccttgcatgactaatgctgtctttcccattataagtcaaaaaactcttaagttttcccagcctcaaaaagcacaatagtagataaggctgacttttccattgggtaccgcagggacagtgcctagggctcacaacactttttaggggcccatgaaaatatttttacgtcttttacaatcttcagacctaaaaaaactcacttttagttagaagaaaatattttcatacatcattttaatgcattcatctttatatcagggtagtcatgaaatttaatttttaatttttttatagtataaggaatctacaaaggcaaaagcacccagggcccacgaaagttacaatgtgaaagtaaattttttttctccctcatttccctggacaattccaacagacatgctgttctcattttatacaaagataattggtgtcctgatggataaagctacatactgtattttttaaatttgaaagcaaatacccaatgttcataaaattatggtacaaactgtagtacttattcactgttgatgatacaaactgatacaatctttttaaaaaacaaaatcttaatacgaggcaagagacatgaaggtaacctcttcccgcctcattttaaacccagtaatccatgcctagaaatgtattttcagaaaataatttaagagatacaaaaatatgtaaccacaacaggacctaaaattctaaaaattagccaggcatggtggtacacgcctgtagccccagctacctgccagacagcggcgggagaactgcttgagcccaggagtttgggaccagcctgggtaaggtagtgagaccctgtctctaaggtaagtaaatacataaaattaaaataaaaattttaaaaatgcaatcaaggccaatgaccaacattaaagttcaataaatgattatatataactatacattatcatagcaaaatactatatagccatcaaaaattaccaaaataaatattaaaagattagaaatgtccactaccttgagtcaaagtgttagaagtcaaaaaacaagtaactgattgtttgcaactccgaaaaaaaatgtatacacgtatgtgatgaagtggagttatttttagaatcgcttcttcaacattatattgcaggagtctgccaacttttttcatagaaacatgtatggtggggagagccagagagtatctattttagactttgtggaccaaaccctctttgttgcactactctgctctgccttgtgttgtagagtgaacgcagccatcgacaatgtataaatgaatgggcatgactgcgtcaataaaacgtatatacaaaaacagatcgtgtaatttgccaagccctgtcatacgtcttttcactaaaaaggaaaaaaaaagtatcagcatattgaattgaaagtgacctccaaattgttttatttctttttgccgcctaattggagtactcggagaactattgtggttctaatgaaaaacaaaggccgtttcaaaagttaaaatgcctatctgcggatgcacaaaaacctatggaacctattccgggatttccttttccctgatctctggttgacttttctttattcgatttctgcctctccctcacccaccatgggtgtttctatgattttaatactaaaaagccattttaagtatacagaaacttttaatttgtgaaggtagctgtacagtatctaaggaaatatagattgcagtggattttaataaggaaagagtcattctctgccttccaaacacctttctgtggcgcctgcagattcagcatctccaactgctcacttgtgctccaagaaatgacacaaaaccaggatttctggtctcttcggcaatcaaaatttgccttgcgaaacatttgcccctagggatagtgtttccacagtaaatactacaggccgcccagttaaatatggatttcagatcaacaagggctaatcttttagtgtgagtattcccgtgtaaaacttacttttcttttgccaaatctggcaacccgacaccagggacctgttgaatccgtgcttagtagagaccaacgtgggcatcagggggtccgctaactgagccaagcgcaggggccagaaacgtctgcaggcgcctcctggatatcccatctgcctttctgaatgctactctgctttcgtaaaagtgactgcttcttgtcttctaccccggcatttctcaaactcctagcgcggaggttttataaacctagcgctgcccgctagttgtggccgccttctgaaagtttctgtgcgggttacctgtcggctggcccggcctccatgggcttccttggcctggaacaaagccctgacgggcggcccgcttttagcgccagggctgggcggcctcggatgcacgccgaggactagcctaggagaggctgctgtgtttaacatatttatgacattaccttttctttcggaactattccagttctgattgtaatgcgccagggagagagatatcagggctcatctccaagcatttaaaaactcttgtttttccggggggtggaggggtctttgcaaatgtgttctcactcgcaagcaggggaggggacgatagagacaagataggagaccggaggggtcggggcaccgctgggtggggcgcgtgcgcgtgtcgcagccctcactgtgagtccctttaccgacgcgatcttggttttgaggggtggggacctggagcgaaaccccaaacccggggccctgcttgcaaactcagcatattctgtctctactccgcctttttcagaggagaaaagacctggcccacgcctcccagaggctttacctggtgaagaggaggagcagccactgcagcgcggtggacagggtgtcctggctggcgccgaagatgtcagtgatagtggccggtacgttctccaaatccagccgcgcgccaccaccgtgcgagtccccggccgccttcttttccgcagagaggataaaggcgtccatcatgtcgcggggggcggccccgggccgaaggctttcgcagtgcctcaagaacttgtccaggatgaagttgctgaagttgcggttgagctgctcgaattcgcggaaaacggtgcgcaccgggttggggaagtactgcagccagggcatcacgtccaccaggctgcccgcgcccaccgtgcgcccgaactcttcgttgtggctgagcagctcacggaactcggggtcgtcgtggctgtagcggcagccgaaacacacggcactcatgacgttggccacggccacgacggtcagcggcctcgggtcgaggaaggcgccgtccgcgctgccgcgcaccagcagcgccaccagctcgcgcgcctcgctcagcacgtggccctcgaggacttggcggctgcgcggctggcgcgtgaagaagttgcgcatcatgctgtgggctgcgcgccgctgcaccttccagtgctccgagtagtggccgaaagccatgctgcggccgccggacaccacacggaaggaggcgaaggccggccggtcggcgaaggccgagccctgctgcaccagggcctggtggatggcgcgctcgccattcagcaccactatggggcagctgcccaggcggatctggaaaacgtcgccgtagcgccgcgccaggcgagcgaacgagaggtgagccgcctggcccaccgccgccgcgtttccgatcagtggccacgcaaacgggcccgggggcgcggaccggagctgccgcctccgttgcctcagcagccgctggcccacatgcacagtggccagcaccgacaggagtagcaggagcgtggtctgctggatggacagcgggtttagcggccaagggtcgttcgggctgaggctggtgcccatgctggggacagagaggagaaggcgtgacactcaggggtgcagagacaggagcgggcgccccacgcccctaccccagcctctggggactgagtgccgttgggtggagaggtcggagctgactctctggagaaatggccgaagacgccccttcccatccccaacccactctcccttggagaagagaaggggcgtgtttccacctcgctgtaacccagcgccaaacccttcccctccccgcaaggcgcgtaacggttcctgcaatctggggacaacgctgcgggcatcgaggcggtggcgcttgatttcctttaaagtacctaccacgccacccgctacctgtaataatccatctgaagaggtcgccgggcagcgcctcggcagacagactgacctgcggggaggtgcggtttccagtggcgcgggacagccggctccgagaaggaactgggacctttgcctagggcaagacgtcaacaggaacccgcagcccggcctggacacctgctgccctcactggaagctttaactcccactcgagtctcttggcgtcgtcagtgccaggagcgcttggattgggatggggacggagaagggtgcctcgctcgccgagccccgctgcccttggggacctggcaaagtcgaggtttcctcacagcgttgagattgagactgggggtcggtgagtggcgtcaattcccatgcccttgcggctctcacaactggagtcgcagaagcgctcgctcccactcccactccagagtcaaagcgcgccatcccgctcctccgggttttaaggactgggtagaaggagggcagcgcgacctggcagggcggggcctgcggggggcggggcgcgccgcacaccaggccgctttgacccggactcccgtccaggcgcaccggccggcctcggagctctaccagcaggctttcatgggagcggaggtgcccacgtttccattgtgcggtaaccgcgcttcatcacagccacctccaatcgaggccgcacggtgtccccagaaccacgctcggtacaacctgccccggccgctgcgctcgacttgggagcgcgccccgccccgagcgcacgacctcccttccctctccgcgacttgagcttgcttcccggaaagccagtgtagtggcagcggtttgcctcacagcgcccctggttggttgtttaaattttatcttaggttctcgcaaacaaattgccacctcagtggaggctctttggcatgctaaattttttccagttcttgcggcgagatcaggaatccctaaaagtagccgctcccccgccccggggccccgacagtgcttgggcacacaaaggctcctggggcgcagctggccctgagatttcccgcgtagaggccactccaggtggcgccgcccgctggtgggcgcggggccgcccaggctgcgatggaagccgttggcgcagggcggggagccaagctggggcgactgggggggcctgggggagctagcggggcgggacccgagcggggcggagagtggcaggaggaggcgaatctccgcgctccggcgaactttatcgggttgaagtttctgctgtcgcctcccctttgcgtgcggagctgggctttgcgtgcgccgcttctggaaagtcggctccagtcatatccctgggcgctgcctgcggccgctcctcccgcgcttctcacggcacctgacacgcggaggcggcggccgagggtggggtgccggccaccaccacccttggcgtggggtgccggccgccaccaccctcggctgcgcacgcacagtcgcgcctgccaggccagcgaggcggacgcttgggccaccacccgcaggccgagcccgggcgcgtatcgccacctcgctgcgcaccggcggctctgtggtcttcctgggcgcgcttgcggtcgcgaagggggccctccctttataagggaagccggaggcgcttgggcgggggtggcttcccccgcctggcgcgccctttcctacatgctgatgcataggattttcaagacagctaagagaacaaggacttcacgaggcggggggaagggcgaactcgagggaagaggtgggatgtatctggttaaccaggtaggaattgtactggcttcatcaaaggataaatataaaagtgataggttcaccagggacaaccctgcactttgagctccactcgcgctgcgaatctcgtgctattattgacctgtttacagatgaataaactagggttcagagaggttgcgtgacttaacccaggtcgcgcagccatcaagaagtggagccagggcttgaagccaccaagtcccactccagatccttcacataagtttacacggaagaaaattgcagataagaggcccaaatgccttctttcctgcctcccttaaaaaaaaaaatgcacgtggggctaggcgcagtggctcacgcctgtaatcccagcactttgggaggcttaagcgggcggatcacttgaggtcaggagttcgagaccagcctggccaacatggcgaaaccccatctactaaaaatacaaaagttagccggacgtggtggtgcacacctgtaatcccagctactcggggatcaggggggaaggcagcagaattggttgaacgtgggaggcagaggttgcagtgagcagagattgcaccactgcactacagcctgggcagcagagtttaagtgagactctgtctcaaaaaaaaaaaaaaaaaaaaaatcagctggaagaactttttaattattgtttttgttttcataattgagaattctgagaatagcagagaagaaatagtatgctaaccctttgcaattaaattgcttatgagggaggccaggggagtgtgcctcatagctgaccctggaatgactgattacattgtaaagaaacacaaaggagtgtctgaaaagaatctgacttcttgagagattgaaaccagcaatcaatttgctgacctgataaagaaatgtcttttcgtgatggctttttttatttttatttttatttatttattttttttgagatggagtctcactctgtcacctgggctgcagtgcaatggcgtgatctcggctcactgcaacctccgcctgccaggttctcctggctcagcctcccaagtagctgggattacaggtgcgcaccaccacacccggctaatttttgtatttttctagtagagatggggtttcaccatgctggccaggctggtctcaaactcctgacctcaggtgatccaccagcctgggcctcccaaagtgctgggattacaggcatgagccaccgtgcccggcctgtgatgccttttattcggtatcttttgaagagttttctggaaatgatttcacacaccatgatggggaacttagatagtgatggagttttagtttttgagcagttgcattggtttaataataagcgttggtttcccagaggtgagttggcctacacagcctttgaaatgagtttcatagcaaccttcccatgtccagctttagcaagatccttgcctaataattcaagactctggtgcatgcatcaatctctcatagactttaatttagtagacgggaattatctatgagctaatgccaatcctgagctgttgacattcctgaaagcctttatcacaatacctctgccagaatgagagcagatggaagttgcctttaagtaaattcctatttttaaaaagtataaaacgaggttgttcctaagaccgcctgtccaactcctcaataatgccatctagtttttagatcaactagatgcatgctttcctgccatcgcagatagatcagatatatcctccaagctgtagttccttgggctcagctctttttctaggacatgactcaaaaatcagaggaactaggttggtaagtgctgtcagaaagataagcccttatcggttatggcaaaccaaaatgactggctatggtaacactttttgcagagaatcttcaagcctggagttcttagggctttatggtgcaaacttcattgaatgccccatccggtaccctgataaggacttcggataaatccagagcagcctgttggcaccccgacccaactcaaggcagagccctgcctctagtgagaatctacgcaggctctttaattatcatcacaacttctcaaccaaagcagggacctaaggcccaggaatctcctttcaatcaacacagaatatgggcattctgccctcccaaatctcaaacttgaattgtttgttgcaaataactttcaaaaagaacagctaagctagagggatagtttaaagtagagagaggtttaaaatatcttatcttgtattgactcgaaggaacaacttaagcttgtttaagcagaacaggaatgcactggcccatgtgcagagaaggataaccgtgatgcttcacaggatacaaggacccaggccgctctaccggctctctgcctatgctggtctttgcttgggctttctctctttgcatggcaaggaagcagcttaaaattaacaaaacaaagagaaagagaacagctctcttccagggtcctagaaggactccagggggccaggctggcatcaggtttttaccctgtgggcaagggcttgttctgtcatcagaaaaaaagagatggcagaacatgctaggaagccaaagagctgacccagtccactccatgtatacatgtctgcccactggtttctttgggttggaggataacctaaggaaacccaaagccattattgttattattattttaaatcagcagatatatgcattgcccttagagccagtagcccagaaagctctgcccttctgctgtcaggctggaactcagttttcttcatggtcttcctctctagtgtgacccctaagtcagtttaatgggtagccactgtgcttttccagtcatctccaaacacacatacccacatgcactgaggagagtggaggagaataagccatctctggtaggctcttgacatttgggtgggcaggattcagtcatcaggcacatgctggtaggcaagaggagcagaaataaggagacacaccaagtggctgagggtgcgatagagggaggaactgtaggataatgcacaccaggggctggaccatgaaaggaatcttaggaattgataccaaaaccctgtgcctcacctgaaatgctccacttccttcctcctggcaatacacaggcagagaaccacagagctaatagaaaggtattttatctaatctcagaagccatcatttgtaggatgcacccttatttttatgtactaacataaagaaaggaagctaccaattataattgcatcatcgactctaagatacatccagatttcggagatgtaaaatggaaagttgagggtatgatttggagctgacaaagcattatacatttcatgcgcgtccgtgtgaagagaccaccaaacaggctttgtgtgagcaataaagcttttaatcacctgggtgcaggtgggctgagtctgaaaagaaagtcagccaagggagacaggggtggggcggttttataggatttgggaaggtaaaggaaaaaggggggttgttctctggcgggcaggagtgggggtcacaaggtactcaatgggggagcttttgagccaggatgagccaggagaaggaatttcacaagaaaatgtcatcagttaaggcaggaacaggccattttcacttcttttgtggtggaatgtcatcagttaaggcaggaaccggcgatctggatgtgtacgtgcaggtcacaggggatatgatggctttgcttgggctcagagggctgacattcctgtcttcttatattaataagaaaaataaaactaaatagtggtaaagttttgggacagcgaaaatttttgggggtggtatggagagataatgggcgatgtttctcagggctgcttcagcgggattaggggcggtgtgggaacctagagtgggagagattaagctgaaggaagattttgtggtaaggggtgatattgtggggttgttagaaggaacatttgtcatttagaattattggtgatggcctggatacagttttgtatgaattgaaaaactaaatggaataagagaaggagaaaaacaggtataaaaggtctaagaattgggacaactcaggacatctgattagagagtgcctaaggagattcagcacagtcctgccagcaaagattatttatttacttcaagagttaagagtggcagtttggggatagcaccaggagatatcagctgtgatggcttggagaaacagcgtaaaccggcagtgtaaataagagcagggcgtgtatgagtagttgagaacggtgaataggagtatgactagacagaagataatagggatgataagtttttttggggcacagtctaagttggtctggtgtctggaatgagactggggcctaataaaaaggagcgtctatacaggagctcaaatgggctgtaccttgtagcattctgaggacaggtctgacttctgagaaaggaaagtcgtaaaagtattgtccagtcctttttaagttggtagctgagcttggtgaggtgtgtttttaaaagacctttagtccgttctacttttcctgaagacggaggaccataagggatataaagatttcactgaatactaagagcctgaaaaactgcttggctgatttgactaataaaggctggtctgttatcagactgtatagaggtgggaaggctaaactgaggaattatgtctgacagaagggaagaaatgactgcggtggccttctcagaccctataggaaaggcctctacctatccagtgaaagtgtctatttagactaagaggtattttagtttcctgacttgggacatgttgagtaaagctaatttgccagtcctgggtgggggcaaatcctcaagcttgatgtgtagggaaggaaggggcctgaataatccctgaggagtagtagaatagcagatggaacactgagaagttatttccttgaggatagatttccatgatagaaaggaaatgagaggttctaagaggcgggctagtggcttgtactatagcatagcctgcctttgctggtgtgtggcgattaggcctggtggaactgccatcaataaatcaagcgtgatcagggtgaggaacaggaaagaaggaaatatggggaaatggggtgaatgtcaggtggatcagagagatacagtcatgggggtcaggtgtggtatcaggaataatgtgggaggccggattgaagtccgggccaggaacaatagtaattgtgggacttaacaaagactgagtacagctgaaggagccggggagcagaaagtatatgcgtcaggtgtgaggaagaaaatagattttggaagttatgagaaatgtagagagtgagttgagcatagtttgtgatttttagggcctctaaaagtattagggcggcagcagccgctgcatggagacatgagggctaggctaaaacagtaaggtcaagttgtttgcataggaaggctacagggtgcggtcctggctcttgtgtaagaattctgaccgcactaaccatgcctaggaaggaaaggcgttgttgttttgtaagggattgaggtttgggagattaatcggacacgatcagcagggaaagcacgtgtgtttttatgagaattatgctgagataggtaacagatgaggatgaaatttgggcttgactgaagtaatgggggctgtctgtgaagccttgcggcagtacagcccaggtaatttgctgagcctaatgggtgtcagggtcagtccaagtgaaagcaaagagaggctgggatgacgggttcaaaggaatagtaaagaaagcatgtttgagatccaaaacagaataatggattgtggagggaggtattgaggataggagagtatatgggtttggcaccatggggtggataggcaaaacaatttggttgataaggcatagatcctgaactaacttgtaaggcttgcttggttttaggacaggtaaaatgggggaatggtaaggagagtttataggctttaaaaggccatgctgtagcaggcaagtgataacaggctttaaccctttcaaagcatgctgtgggatgggatattggcattaatcggggtaaaggtggttaggttttaatgagatggtaagggatgcatgatcggtcaccaaggagggagtagaggtatcttatatttgtgggttaaggtgggggaatataagaggaggacgcaaaggaggctttggactgggaagaagggcagcaatgagatgtagctgtaatccaggaatagtcagggaagcagataatttagttaaagtggctcgccctaataagggaactgggcaggtgtggataactaaaatgagtgcttaaaagagtattgtctaagttgccaccagagttggggagttttaagaggtttagaagcctggctgtcaatacccacaacagttatggaggcaagggaaacaggcccttgaaaagaaggtaatgtagagtgggtagcctccgtattgattaagaaggggacggacttactttccactgtgagagttacgcgaagctcggcgtctgtgatggtctagggggcttccaaggcagtcgggcagcatcagtcttcagccgctaagccaagaagatctgggaagcagtcagagagccttgggccagagttccaggggctctgggagtggctgccaggtgagttggacagtccgatttccagtggggtcccacacagatgggacatggcttaggaggaatcctgggctgcaggcattccttggcctggtggccagatttctagcacttgtagcaagctcctaggggaggaggttctggaggaacgcctggccgctgcggttcaggcgtttggaagttcttgtgtgctggagatgtggctggggtttgtctcacagtggaggcaaggaattgcaacttttttctattattgtacaccttgaaggcgaggttaattaaatcctgttgtggggtttgagtgccagattctaatttttggagttttatttaatgtcgggagcagattgggtaataaaatgtatattgagaataagacggccttttgaccttttagggtctagggctgtaaagcgtctcagggctgctgccaaaggagtcacgaactgggctgggtttttatgtttgatgaaaacgctatctgatttgggataaagaaaaaggagcattaaccttgactgtgcctttagctccagccacctttttaagagtcaattgctgggcaggtgggggagggctagtcacgaaacgaaactgtaaggcagaccaggtgtgaggaggggaggtgataaaaggattatagggtggaggagcggaggctgaggaagaattgggacctagctgggcctggcgaggagcagcctggggaggtggggagaggtcagatgggtccgtagaaaaggaagattagaaagcctcagcgacgcttggggttgggactgaggggacaggtgggagggaaagaaggaagatttgggatgagttgcattgggaacagagactagagagggaccgatgtgtaaaagaatgcctggatgtcaggcacctcagaccatttgcccattttacaacaagaattatttagatcttgtaggatggaaaaattgaaagtgccgttttccggctatttggaactactgttgagtttgtattggggtcaagcggcattgcagaagaaaataagatgcttagattttaatttaggtgagagttgaagaggttttaagtttttgaggacacaggctaagggagaagaaggaggaatggagggtggaaagttgcccatagtgaaggaagcaagcttagagaaaagagagagtagagacatggagggaaggggtttgggggttcttaccttccagaaaagcgggaaaggggttggggcacggagaagaggttggggcacggaaataagggatgggggcacagagattagaggttggggtgtggaaataagggattggggcacagagatataagaggttggggcgcggaaataagagattgggcgcagagataagaggtcggggcacggaaataagggattggggtgcagagatacgaggttggggtacttgcccctcctctagaaaagcaggacttgccgctcagggtgaaggagaaggggttggggatttcttgccccccagaaaggaggagaaggggtagagacacggagagaaggggttggggtacttgccccttccccagaaaagcaggacttgccgctaagggtgaaggaccaaggcaggcgtccctgcatggtctgacacctctgaaacctgggtgaataatcattgcagtccctgcaatgattaaacaccaagggaaggctgccttcccagtccctgaccggcgccggagttttgggtccacggataaaacgtgtctcctttgtctctaccagaaaatgaaaggaattgaaattaagagaagggagagattgaagagtggaaaggagaaagtggttgaaggacagtgagagaggttggagaagagagtaagaagaggccgcttacccgatttaaaattggtgagatgttccttgggctggtcggtctgaggacctgaggtcgtaggtggatctttctcatggagcaaagaacaggaggacaggggattgccctcccaagggaggtcccccgatccgactcatggcaccaaatttcatgcatgtccgtgtgaagagaccatcaaacaggctttgtgtgagcaataaagcttttaatcacctgggtgcaggcgggctgagtccaaaaagagagtcagccaagggagacaggtggggccgttttatatgatttgggtaggtaaaggaaaaaggggggttgttctctggcaggcaggagtgggagtcacaaggtactcagtgggggagcttttgagccaggatgagccaggagaaggaatttcacaagacaatgtcatcagttaaggcaggaacaggccattttcacttcttttgtggtggaatgtcatcagttaaggcaggaaccggcgatctggatgtgtgcgtgcaggtcacaggggatatgatggcttagcttgggctcaggggcctaacaatacaggctgacaaggattctttctttgtattaagcactttctagatttcttggagtggttagcaccaagggtattggctaccaatcctcatttctattaatattatttcatgtagacaaatgtagacaattgatgttttctcaatcctatgtaaagttggtgagaaggtgatttagaagattctgctatttttattgacctaaattaatctaagaaaagatagtcacttgctaagtagttgcagcttaaaacaagtttcctactcctgctccccttccaatctcgttgcccatgagctctgtctggtattagtgaaagtgacagaaatacatgtagtgaaagctacatgtattctagttcctcaccaaaatgcatatttagaggtaaaggggtgtaatgtctgccacttaccctcaaatggctcaaggaaaaaatagaggggtttggggagaaggagagggagagagaggagaatgagaaagtaagtgtggtcaatgttaattggagaatctgggtaaatgggagttctttgtgattccttgaaactcttctgtaattatatcaaaattaaaagttaaatataagaacataaaaaaagatcttcccaacattttgatcttacattgccttcttagcttctcttgagggtttcttgtaagcaaggacagtggaaagaaagtgggattagtctgctgttcagggtcctgcatctgatgtgtcactcctggagttcaggactaataaaaagtttgtgctcaattgcagtctttctcctcagcactatggattataacctgtactttctgtgccgtccttgttctttgaatggcttgagtgtgtcttgtctcttttatcttaggctttcttcaattccttttgaaagcagaagaaatatgatataaggcagtgtcatgcccttagttctactgtgcccctgtgttaaggggcataatctactcagggttctatgtgcttcataaatgcagcaaatggtgctgtgctttaatggtttttcccagcatcattcccagttctttcctttggtttgcttccttctgcccttttccttccccttgcttcatccttctttcttctctctcattctgtctctcattttccctttctctgggtccactcctatcttcctcaccctcattccctcaagacctccactctcgtctcaggtgcccccttttctgttctgctgtctcccttcctctcttcattctctctcacacagaagagtaaagagtcagggcagaggggaaaagagtgagggaaataagaagggggagcagagagatacagcaactaagaaaaagaaaaagaaaaaaatacccagccctggggctaaaagatagtcacggtggtcagtcactttgtctgggctctcaactggtgtacttacctctcctgctcaacgtttgagcatgtgcctctgctgcttaatatttgtggggtgaagctcccaccgacttggcacagtgatgattccatacgaagggaagggacgccagggtctgtggttgtttttgtacgtttgttctctgagcttctactaccacctactctacttcctgaaatagacttttctctcctccttttccttctccttcttctttctttttttttcagagtcttgctctgttgcccaggctggagtgcagtggcaccatctcgactcactgtagcctccacctgccatgttcaagcgattcacctgcctcagcctccccagtagctgggactacaggggtgcaccaccatgcctggctaatttttgtatttttagtaaaggcagggtttcaccatgttggccaggctggtctcaaactcctgacatcaggtgatccacctgcctcggcctcccaaagtgctgggattacaaccatgagccactgcgcccagcctgaaatcaacttttctaacagtgaaagagggagcctactgtccacaactttggtcaatagggaaacactttacttccctaattctttgaccaaccatagaaaacctttaggcagataaaggatactagttttcctttttattttcattttctaaaaataaatatttaccaggttaccaagaaaatacataaagcaacaagtaaaacaccccaccaccaaaagaatgtacatttgggctcagctaagatcacaacatctagccatggacatgttgactggtacagcctccaggtttttggatggttagcatccagattctagtctttctttctctctctgtctgtctgtctgtctgtctgtctgtctgtctgtctgtctctctctctctctctctctctctctctctctctctctctccctctctccctctctccctctctccctctctccctctctccctctctctctctctccctctctctctctccattcacctcttagtttttagcattagatctgcattccctcacaggtttttttctctttccacaaatggaccaaaattccggttgaaaactctgggtgtatccagggtttgagaaaataattgatagttaaataacttaagtggttagtcctcccctgcatgatcccaacggagaacacaaaggctggatagttatacgtcagcttttttgaccattgactcccaacaggatttttcccttctactattgaagtgatcatttctcaactgttgtctgttctattgttggactgctttggttagaaagctgtagatgctagaaggttcttcccaatattaagaaaaattctggagtgaactttcttgccttctggtaaatctagagctattctttggagtgacataaagcaagactcattctcctttgctgtcacatgtttgaagatggaattgtgctgcttctgagccatccttccaccaattaaaaatgccccagttccttatctctgccttctggacaatgtgctttttcagtatgtccatctgagtatgggcctgaaactgaacatagtatcccaaatatgacattctgtctagcccaggggggtgtggttacttcccattagacatagtgttactttcaatgcaaacaaagtttttgccctgttttaatatatttgcatcccactattaaaacatctatattctactaagattgtgataagcaaaaatcttcatcctttaatataggacttggtagctggctgagtcttcagttgtacttgtattattgatttttcaaaaaaatactacatgtgagattttacatttatttctattaaatgcatcttgtggctttaggatggtgttctggcctacagaggccatgttgatactcccaggagcacagactaggacaggacaggaagactatccagggaaagcatggcccagtctggactacttctaggcaaaaatctttggactgcggtttatgttatatagttgcatcattatacatccagaatattatgcatattaaattatttttctattttggccagatatttattcttaaaacacacacacgtagtaacatagattcttgttgcaagagagtcaatcagtatataaaaatatgcagaaaaatgagaataaaatgagaaaactcacactcccaccccttcccagagtaaccatgggtaccatgtgccttctatttatgtacatgcatacggttgtacatatagatagatagatagatctacttcatgattttaaactactgcatggtatgaccatgacattattattgtcattactattattattgagacagggtcttgctctgtcacccaggctggaatgcagtggtgtgatcttggctcactgcaacctccacctcccaggctcaagcaatcctcctgcctcaggcttccaagtagctgggaccacaggctcgtggcagcatgcctggctaatttttgagtattttttagaggtggggttttgctatgttgtccaggcttgtctcgaactcctggactcaagccatcttcccacctcagcctccaaagtgctgggattataggcgtgagccactgcgcctggccaacattattttttcaaccatcaacggcgacttagatggtcatttgtgttgttctcaactctattattagagactccactgcagtgatttcacttttctgtgcaattctgaatccatttgcaaatgttcccccagtatcgattctcaatagaaatgcttgagccatagggatatatgcatatatgctacatcctcactgtcttctaaaaaggtttgccaattcccatctctatgaaccttggctttgtaccaagtagaatgtacctaaatacttttccttctataaaggatggttactttgacttaggtttgccaacatggaacaaaacaaacaaaacaaaaattttacttgtctttcagacctatttcttctcttaaagaatacatatgcctgtgttcagattatctcctcttcctgacaaatgagggaaatccccagatgaaagctgataaaacattagacgggggtgattccggacctccacatccctatggaacacatcacagaagccaggattggagagccaactccacacacctccatatcccctcttagatgaatggcaattctttacaggccgtgggcgcaggcccaaatgccttctgggcttgtctaatcctccagaggatatcaaaggcaatacagccagcatacccaatcattaggagtttggcttctgggaccgggcactcttgggtgtgagcaccagctctcttatttataagctgtaaccttggccatgttatttaacccttctgagcctgactttcctcacttgtacaagacaggtaatataccaaccacagagggtggttttgaggattaaatgagatattgattgtaagaaaacaaatagcatagttgatggcagagtgagcacccaataacagttagccattatcattattactactacttactaagtccttacttctgtccagtaaaatccaagacatggcaaggacttgaacctcgcaggaataaaaacatggcccacttggttcagcgtgacagctctcagggtggcgtgccgttacccacctgcaaattcctaacagcccaaagtggcaccagtcacttcctccttgcgtttctcaggcagcacattgagtggctgctagcatcactccagagccagactgaatctgaatctggctctcctacttacaccggagtgacttccatgctagaaatcgcttctctgggtccagcttacacttaagtgaatggagatgtaaaatggagacgataccagtaccgattatgcagagttgtggtgaggactgaatgaactaatacatgtaaagcttttagaagggtgcctggcatgtggtgggtgctcaggcatcattagctgttatcattattctgtgggaggccatttgccgctgccttaagaaggctgatctcacagaaacatctgctgttggcagaagagctcagcaccaatagccaatttgtgtttccctccaactcccagatggcagctctgcagcactttctcctcatctaatttctcctcacccagacgcgctccacatcaggacccttaggtagtacagagacagttctttaggcagggggatgccatgttcccaaaagagcctgatgaggccatagtaggcctcttccaccaagctatgctttcggtcagtccctctgtgactgttacggatgctttgtagccctgtggcaatgaggctccaggacaacactcatgcaattccctgctgaggagagttcagaaaactccatgctgtgcagtgcaattgggaggaaactcaagggagtgctgtcgtgggacctcccggtggtgatttgtacaaatgacgcaacgctatccagcttcccagaaaacaccgcctttttttcttacattacagctctgagtcaaagtgtactgtggcctcagacctggggcatacagcccatttgacagccacaatgagggaaacagcctacttctggagcctgtaccagaaggcagaacgggagactcccagctctcccttactaaaggccagggaggaaattgtctcgaatgctctccagtccaaaatggaaagttagattcaatggtctgtactcttgggctgactaacctccgtttttccttttcccattgtgctgagtcagccacggggggtgggttgtgcattttaagggtttgaatgcagaaggaaggaaggcttcccagtttctgagccttgagaaggtggcactgtggcctccaaccagcagccatgcccccaggcacctcattctcctacactatttcagggactttctggtgcaataaggatgtgactgagccctgagcccccaggttaccagccacaccccagtggaatcccgggagctacggggtaaaatggaatcctcttccacagcaagtgcacagaaggcactcagggctggtgggaacctccatttctgccctcatttactctggactctgaacctaatacctgaggcttcctgcagcaaatcagagaggtgaagagcaacttacacgtatcttttttttttttttttttttttttgagacagggtctctctatgttgcccaggctggtcttgaactcctgggttcaagggatcctcctgcctcagcctcctgagtaacacatatcactcaacaaggaataaacaccacaacaattttgagtaccacagtcggagcactgtgtcctgctaaatgtgaggagcattctctctgatgttatcatcataaggccagggcctgtggcttaagctcctccgttcccttagagtctcccacaccacacaacaagtttggagacagagaaagtagctaatatttccccctaagtgccaggcactgttttctattttttacattgacagtttcatttatttctcccaatcatcctaaaaatattggtatatttagcctgctttatatacaaagggattaaggctcagagacagtaaactatttgccaaatgtcacagaggttgcaagtgagaggggtcaggatttgaattcaggtctgcaggcaccaaagcccatctataccacaccagtacacatttgttgactcactgcgtatcatcctaagtcttacagaagccccacccctctaactacagtaactgtagaggtctctagtactgttatgcctattagggacctgggccaccccactgccttctcctgccctgtgagctgactccctccaggagcccaagaccacaacaagcaaagccatcttgttgccagagcctgatgcaactcacaccctcttcctcccctccccttgcagaatatccttggtatctgcccagcaatttaatctccacaatttacaatcaaatcttgggatggcttagaaaatcttcctttaacacagtggctggaacatgcagagagttggcatgcagcctccacatgggcttcatgactagatctgctacactcaaacccattatattgaaattaccataaaattcacactattccaatcctcagaaatgatggttttatttagaagtaagtgagcaaaagcaatgatttcataggccccagtgccaaaatcttagctcaatgtttctcaaatgttttgttttcagaacctcttcaaagtcttaaaaaatattgtagagtccaaagaactattgtttagctaagtatctatcaatatttataattctagaaattaaagctgaaaaacttataaaatatttgttagttcattaaaaataataaacctaatacatgttaacataaataacattttatggaaaataactagtttccaaaattacaaatatttagtcagagtgggcagttttaaaaaatattgttacaaatctctttaatttatgacttaacagaagatagcaggtgactcacatctgtttctgcagaaagaccccccagtaaatttgtaagagaatgagagttagaaatgcaaataatgttttattcccacagctgtaaccttgtgggtttcctggaaagggtctcaggggccatcccgacggggtgcctggaccacactttgagaaccattgtctaaacttaagagtgtgttttttgggccgggcgcggtggctcacgcctgtaatcccagcactttgggaggccgaggcgggtggatcacgaggtcaggagatcgagaccatcttggctaacacggtgaaaccccgtctctactaaaaaatacaaaaaattagcctggtgttgtggcgggcgcctgtaatcccagctactcaggaggctgaggcaggagaatggcgtgaaccccggaggcggagcttgcagtgagccgagagagcgccactgcagtccggcctgggcgaaagagccagactccgtctcaaaaaaaaaaaaaaaagtgtgttttttgtttgtgtgtgtgtgtgtgtgtgtgtgtgtgtgtgtgtgtgtgaatgtctcttcatccaagaaaaatctaaatgggctattgtcttggcgtaggaagtaggtgagggtgcggtggatttcagaaaaaataatgtcccagttactgattttaagagaatagccctgagacaagtgtgggcgcattgaaacaccactgcaaccctctaaactattgcagagttgccaccaccaggtgtctggctagaaagatgtcatcttcccaagacagctacctgcccagatgatgtaccttagccccaggaaggaggaggaagaagaggcagacagaatgatgcccaaacccctgcggcccggagacgaggtagtgcctgagtcaggaagctgggagagcccagctcagtggaagaggcatgtggatcctggttaggtgtgaagccaggagggcttcttagccacagcctgaaatcgaagcccaggatcgagccacagtctgaaatttttggatcgcagctctgccaattaaaccaatggtaacaataataatgtactgtcatatatgtaagaactgccatatatggagcattttgagccaggcaatgtgccaagcacttgacagaaatcatttcattaatcccacacagccaaccctttgagataaccattgccctcatcccttttttacagacaaataaagcaaggcaggaagagttggaattatcaatcaaggtcacacacactatgttggttgagctgaaatttgaattcagttccgccgggctgcaaaaactctctgctgcttcccagctgcaccagctaggcaaactcctgccagaggaaatctcacagttggagtgcagtaggcatagatttctcctacttaactggggggaggctgtagtcacagcgaagggaatattattgtgtcccatgggaagaaacatgaagacggagtggacgcttcattcctactccaatcagccatctggagggttcagggctgaactgtagtgggggcatcacaaaacttagggaggtgaggagcctcccttagggaggtgacagcctgagtacatggcccccaagctttcagatcccttcctgcacccctccccacctagctctgcacttggcattgttgctactagccaggaagtctgagatctgcgcaaaccccgcccttccccgccgcccccgtaagcactaccgtcccttcaaagttcagacgtggggtcctttggagccctgctccctagagggtcgcctggcacatggccacctccacatcccgccccttctgagctcagcctcccagaggtgtgaacttcttacaaacacacactatcacccaattccctggaaaaacaaacaggacaattgtgtgaaaattccattctaaggcatcctcccttctctgtaaccagaggctccaaggagttcagcatagcacgagcttttaatttgcgtgcagacaagcacaaaaggcacaaccggatatacctgttatttcccaatgacctgagagcccgaagtttatgttaagccttgggttatggcacagcttgcacgcaaggccctgcagctcctgcaggcaattgagaggtggtggtgtacaggacagaggaacaactctgaagtgacagcacataatttaattccccctaagctttccaagcatgcagactgttccttttttgtcagcgtataacctaagtgatttgttctactcaggcaagaaatgtctaatttaaaccacattgcagctaagcccttagtgaagaaggagaactccttgaggcttagccgtgcgtggttaggctggtggtagctgaggcaaagcagacctctttcagcccctgtatttcttactcaggtcatgactggagatacgtgggttggggggctctaatcaccacactcactcttctgtctcacacttcatccctcgtgaatgggtttagttttagtaagaatgtttacaggagagtgttggctacatgtccccaacatcccgggtttgagtcccatctgagccaccaggagttgggtgacttcagggaaacctcttaaactctaaccattgttttttcttctctgagaaacaggacaaatcggtagtgggggtgcacagattggcacattttcgtggcaagcgatctggcttaggaagcaagagatctgtgctccagcctagctttgttcccaactagcagtggatttgcagcaaggaacttttctctgggcctcaatttcctcatctgtaaaataagcaggctggatgaaatggtctttgaagttccttcagctataaaatactatgtatgtcttaaatcacttggagtttgacaaaataatagttataataattttaattattattgtgatttcttcctacaatcccaaagatttcactagccatgcaaatcttttaaaattcttctttaaaagtacttttcttggccttactgacatgaagcaaagaaggattctaggcccccagatggtaggatttggggtagacattctgtgtctgtctcattccccatggaattatcaaatttcccccctagccacgccagactgctaaatggtctctaagtatagcctacatttcaaggctgtttcctcagccaaaaatgccccttctccttgtctgctgtgaaactcccttccttttaccctcctctttccattatgggacagttttctcttctgggctcccttgagcacttcacactattattccattgacttcatgctgttatttttggttttgtattcaatatatctttgctcaactagaccctcaggaactctgtcatctgtaccacccagcctctccttcccagccttccccagcacctggtacacattcatggaagaattaacttttgaaccctgtggatttcatcacaataggataagaatgctgcatgggtttaggatagacgttcacaatctgagatgagcagtgctagccccagtccccaaaggaaacctagttagggtggtgattagagacattttgaacaattacttcaggaaaggatcaaattcattgaaaagctgcttatcttagtgaaaatgttgtaactgtggaaagacataaaagacaaaatgttcataactgtatccttggaagtgcctttctttaaagaataggaatcatctcaccaaagtatttgaagaagaatgtgtgtggttgtttgcatgtagctgcctatacttaagaatgttacatatttcatttctcccaggatcactcagcctaagagaagaattcgaggttacttttagggaggaaaggacacttacactgggaattcaatcgatggtagttaagcgtcctttttctttaataattgggataagtatgacacatacaactttacatagcatgctcggggagtgaggagagaagctagagaagactgagatgagtgaaatgcaggcttgattgagaaactaagcagaatttctactaacagtgaggattgagggagaagcgttcctgtaatggaggggaaatgaataaaacctcgactcccagctcgacagggacctttcttctcctagccagctggaatgcaagctttaaaaaaaaaggaagtgtggggagggctattttttttaataagacgtctcagaaatgatcatgaacacagtaaagctggttttcaaaaaaggaaagtgagaaaagtagtgacaacttgaagctggtagttgaggaagaaggagaacttctgaacccatgaagagagtatacccggtttgggtgggcaggactccaaagcctttaggatcgatggaccagaacagagaaatgaaaatgcaacaagaacagctgtggggaaaaggcagaaggggggtaggaagcgaagagggtgtgtacttttcctttctgatctgagaaagggaaattttgtgctgggaagagttacgcgggaggaggaaggaaaggcgccaggaatgcctggaaggtatatgatgtctgaccttatgatctcttgcaacaatttctacaccgattgtgtcccttcacctctgctctaaaaatgtggttaggtaaatatctgttttattaacattgtgagaaattagcctcgtttacagaattccacaaaacaacttgcaataatgagaggctgctaggatgtaggtgatactaggagaagcaatgccttgtctgaacccccagggctctggaggcaccgctttgggtttaaaatctttccttagtgaccttgaacgtaatgaaataggagagaacgttgatcttagagtagtaatagcacaaaccacagccttaatgcccagcaggcttagttcgctggaataattagcctaggaaatgcatgacttaagatgtccccacagtggcccccacaaagtctgaaggggaaacaaagagaaagccagagagcctttcatagaagggaaccaactgcgtttacatgcaaaagatccatctcctgtggctacctaagagcagtgactctctgggggtggaataatttatacatgtgtaaaaacatttatttttctacatatttacttcaagcatgtgttaaaatatctgcaaacaactccagaccccctccccatcttatttttatcctaaaggcagtgttacatggatatccaaatgtttagagaggacaatcttaaatatacaaaagaatgataaataaataaataaataaataaataaataaaaaaaagatttcctaatttgtcaccacttgcatgctggaaaccgacagcgctaacttgggtaatatccttttaactctgattgaattatatgttaattccttgcggtggtcttagatttcagacgctattagcaaattatggaggaaaagcaagatcatatgattcatgaactatcacagcagcaacagtttctaatttccacccatcctctgtgtcatgtgatatgtttcagaaactcacttaaaattgagaaaataagccattcctaattgtacttaagtaaggaaatagctcatttatgaatctaagaagattaaagaatatggctttagtgtgtttgtttagaatctatgccaaaatttttttccgaagcataaatctggttttttttcttttccttaaaaaaaactttaataaagccaaagaaagaaagaaaggaaagaaagaaagaaagagggctccacatgcagtttcagcactaagggatcctgacaagtaattcacctctgctttgaatgtgggatttttgcactctatgatatatacctttggagtggttttgttttctttgtggttttttttttgtttgttttttgttttttgttttttttgtgtgagacagtggatttttttatccatcattgcattattggagttttatgtgatttaatgtataaaaagtgaggctattctccaactagttgtttgggtttctgtaaagttcaatttccacagtttacctcaagaggtcttttaaaaatgaaatttcaagcatgttgcttgatattctttaacatgttctcaattaatttgcaataaagtccagcccccttcctattgcacactattgtacccttcctgcctttttcatgcactgctctccacccaccctggcttcccggctttgcctccaacgtcagagtgatttctgggcttgcttttttttttttttttttgcctggaaacttcttctctgaagaactttcaaatggctgccttcttcatgtatctcctctcggagcatcattccctgaccttcctttctagggctctgaatccaccccattgctgtctatccagtcagtctctcttttctagctggcatccatcacaagcaatctgcttatcttgtttttggtgagtttatatctgtttctaccactggattataaatacttccaggatagagatctagtttatatcactcaccattctcttcccttagtgcctggtatgtagtaggtgttcaataaatgtgtactgaaagaatggatgagtgatatgatattgatctgtacctattttttctttttagtctatctttgttgagttttggtattgattttatgtgtcagtacctgagaaggagagaagtccttgagttgtttcgtaaatgtggctcaagtgagatgctgaacagtgccagccatgtggactctgccacagtgaaggaggaaggtagagaaaatgggttccagtgtgtgtgtatgtgggggtgggaggggtgtgttgatttaggggtgtacagaaaatggtggtgtgcttcatgacttttttttttaaagaatgaaaccaggacatcaactgagcatataagaggggaaagtggtgcagtagggttaaggcataatgaaaagatttagaattatcctaaaagagtaggaaagcaaaccacgtagagatgtataatagaattccagtgttgagtttccattttatcatcatgaatttgaagtgagacagctggaatttgggatttccctaacacttgagctgggaaggtaaattgttaatcacttttatggagccagtgtcctttgaccaagcaatcctagtctaggaatttatcctaaagacaattggacaagtttgagaaaatgcatatacaaagtcgtttaacaaaatattttattataattgacaacaaataaatggaaagtacctaaatattcagcaatatgggattggataaattctgaaacatacaatgggatattttgcagctattaaagactgtctgtctatattcattgatatgatgaataggtatgatgagttattggtgaaaaaaatgcagttttcaaactagcacatagtgtaaaacccttttttaaaagtcgtttacactcatgtattttagcataaagaaagacatggaaggatgttcaccaaaatgttaaatcttctcaccctcttctatgtatctttttgaattgggtgaaatgttctataatgagtatttgaaaacagaataaacagaaaaaaaaagatttaattagatcccatttgtcagtttttgcttttgttattgttgtttttggtgtctttgtcatgaaatctttgctagttcctatgtacagaatggtattgcctaggttgtcttccagggtttttataattttgggttttacatttaagtttttaattcatcttgagttgatttttgtatatggtgtatatgtagtcttctacatatggctagcgagttatcccagcaccatttattgaataaggagtcctttccccattgctggtttttgtcagttttgtcgaagatcagatggttataggcgtgcaggcttatttctgggctctttatcctgtttcattggtctgtgtgtctctttgtaccagtaccaggtggctgtggttactgtagccctgtagtatagtttgacgtgatgcttccagctttgttctttttgcatacaattgccttggctatgtaggctcttttttgattccatataaattttaaaatagtttttctttccagttctgtgaagaatatcattgatagtttgataggaatagcactgactctgtaaattgctttggacagtatggccattttaatgatattgattcttcctatccatgagcatggaatgtttttccatttgtttgtgtcatctctgattcctttgagcagtgttttgtaattctcattgtagagatctttcacctccctggttagctgtattcctaggtgttttattcttttgtggcaattgtgaatgaaattgcattcctgatttggctctcagcttggctgttgctgatgtatagaaatgccagtgatttttgtacattgattttatatcatgaaactttgctgaagttgtttatcagctgggatctaatgaaacttaagagcttctgcacagcaaaagaaactaccaacagagtaaacaacaatgatctacagtatgggagaaaatatttgcaaactatacatctgataaagatctaatattcagcatctataaggaatttaaatttacaagaaaaaagcaaccccattaaaaagtgggcaaaggacatgaacagacacttttcaaaagaagacatacatgtggccaacaagtgtataaaaaaagctcaatatcactgatcattagagaaatgaaaatcaaaaccacaacgagatactatctcacaccagtcaaaatagctactattaaaaagtcaaaaaataacagatgctggtgtggttgtggagaaaagggaattcttatacactgttagtgggagtgtaaattagttcaaccattgtggaaagcagtatggcagttccttaaagagctaaaaacaaaactaccattcgacccagcaatctcattactgggtatatacccaaaggaatataaattcttctactataaagacacatgcacacatatgtttattgcagcactattcataatagcaaagacatggaatcaacctaaatgcccatcagtggcagatcagataaagaaaatgtgatacatatataccatggaatactatgctgccttaaaaaaaaccagatcatgtgctttgcagaaatatgaatggagctgggggccactatccttagtaaattcacgcagaaacagaaaaccaaatacctcatgttctcacttataaggaggagctaaatgatgagaacacacggacacaaagaggggagcaacagacattgggacctatttgagggtggagtgtggcaggaaggcgaggatcagaagaaataacttttgggtactaggcttagtacttgggtgatgaaataatctgtacagcaaacccccatgacacaagtttacctaggtaacaaacttatacatatactcctgaaccgaaaataaaagttaaaagaaaaaagaaagacccatctgtatagtgctctctctctctttctcttacttggtttattctcttccttatccattgcatgcattaaccctttagaacttccggtgttctggggaccctgaaagatcagctagcaggattattgcggggctcagtgcagtgatgcagaggcctccaccagcaatcctgaagttgaaagagaatatccacctcccttatgcataagggatagatttgggggtggcattgaaggtctttctctcattttgctggcagctgtagcaatgcattgattagcaggagaggttttctctctaatgagccagaaactaacacttgtggagttcctgctatacaccagcactgtgcagggtgctttacatttaaaaaataaatctgggccgggcgcagtggctcaagcctgtaatcccagcactttcggaggccgaggcgggaggatcacaaggtcaggagatcgagaccatcctgtttaacatggtgaaaccccatctctactaaaaatacaaaaattagctgggcatagtggcaggtgcctgtagtcccagctactcggcaggctgaggcaggagaatggcgtgaacccgggaggcagagcttgcagtgagccgagattgcgccactgcactctggcctgggcaacagagcgagactccatctcaaaaaaataaaaaaataataaaataaaaataaaaaataaatctgtttaatcttcacaataattctacaacgaaaaaattgttatctccattttatagctgagaaaaaaatgaggcacaatgaaacaaaagcacttgcatagcacacaatataggaaggagtggagtgagaatctaaagtcaagtttacagcatgctgttttcaaggcaaaactacttttgatttaaaatcatattcttttctctccccaatctcctccagctagcgtttcatccgtgtggatttgtcaggagacaaggaaaatcaaatttccagcaatgcgtatctagtgtttaacaatcacatcattacacatgaaaaaaatttgaagcttgtcagatcaccattgtatgaaatatttcccacttgggaccatacagctctgtatttttctgatcagttacaatttttaggatctagtctttatcccagagacccagatctgtgtattctgtattcttttgtaccctgtgttattgcttcaccaagagtatactccaggtgatttttttgtgtgtccttaattttgtcattttgtggtcattaataacatcagttaacaataatattattatactgtccactacaatgtgcgtttgtgagcactggcaacaatttagcagaacagaatgagttagattcccaattgtggtagatcacgtgtagtagcgaacagagcacagaaactccggatcctaattcttgatttcctggcagtgataccttcccattccattacataaggtataagtggcagaagatcagggagaaccacagggctgtaagatattttataagttgttaaataaggggacactgctttatttggggcatgtcactcaatctcttcaacattgtgttaggtaggtatcatgaactaaattgtggccacccaaaactcatacctcgaaccccgggtacctcagaacataattgtatttggatatggagtctttaaagaggtaattaagttaaaatgaggttgttagagagggctgtaatctaatatgactggtatccttataagaagattgaaaacacagatgtgcacagagcaaagaccacgtgaagacacaaagaaaacagccatctgcaactcaagaagagagtcccagagcacattgtgatctctgacttctggcctccagaattgtgagacaatgaatttatatcgtttaagccaccagtctgttgtactttgttatggcagcctgaatgggccaatacagtgaggttccctggaagactttcagatggggacttgcatgcaagaagtttaacagggagagctctcaagagcaacccccggagggagagagggaggaaaggaaaattgggcagagagagaagctgacctctgatgcagctgctacaaggttctcagctgatcctagggttctcagctgatcctacagggtgttctggagctgggatggccccgtagagttgcctggaatcaaggcagggcccagggagggagataaccttggcaaaggcagcttccttcagcgggggaattcccagtgagggactcaattgtggctgtttgcagtgggcactggacagctggggagtgagtttctccgccctgacgaggggtctgggtgacatctcacagcatccatcgcagacctgcagctcctagtctgcagaccaggataagcacaatgcctgtggtgcatttccccgcaggcggctgtgaggagctaatgagataatggatatgaaaatgctctgcaaactgtgaagactatcaatatgctgttatgcatcattctctgttatttgttgctatcctgtcctttcaccttccccaggccggaatgatcacattttctctttccctagctttattcctgggtcactagcacagggaaaaaataagaagaaaaatcagagtggaattctaaaaaacaaaggtcctgtgcttttctgcctaaaatatgtacaatcctcagttggcactgtcaggaatggggaccgccctcatggagaagtggcacttccactcctagccagcctctgtgtgagctggactctaaggtcaggagaatgaggaggccgtgaaggtcttggccgtctctttttcccctcatctctactgagacatagatcgagacagggacccataaatcaccttggagttaaatcaggggaaaaaagaaaagccctctcaggcaacagcatttcacagcagcaacaggaagttgtagggaaaagagaaaagtcaaaactcaagtgaaaatctgagtcatggttcagagaggccacaaatacctttcttatggagagtcagaagagggaacacagagaaaactgagaggttttttttttgtttgtttgttttgaactttttaaaggagaatttgtttttaatcctgtgaagctagtaaacatctctttaaagaatgtgtgtggtcacacaagttgaagggctagaaaattacctcctcacagcccagatggttttaagtgggaacagataggaaggagcgtgagttaaagctcccacccacactacaggaccctgctgttccagccgctttcctctgccactagctcaggaagagcgagggctgcctctcagacacagggagttcctgcaggctgacttcaggcactccagaatgaggtgtccgtattttcctaagtgctgagggtcaccctacctcctcctcttttattaagattctctgaaccactcagagaatacacaagttaaaaataaattacttcggcagatagtgagggtacagaagtcctcggtaaggttttccttttaatgaaaaccagccccaaatacttttcctttctaacaaagagcagcctgtgaaatcaagctacagacatagatgccagcagaggaatactacctgggactaggcatgttcaaaatggcggttccatcttctcttccttttttttttttttttttttttttttttggttagttagtttgtttttgttgttgttgctgttgtttgagacggagtctcgctctgtcgcccaggctggagtgcaatggcatggtggaggctcattgcaacctccacctcccaggttcaagcgattctcctgcctcagcctcccaagtagctgggattacaggaatgcaccaccgtgcccagttaattttgtattttagtagagacggggcttcaccatgttggtcaggctggtcttgaactcctgacctcgtgatccgcctgcttcggcctcccaaagtgctgagattacaggtgtgagccaccgcgcccagcccatcttccttttctcagtgccagccacgtgtacattaaggaacagacaacatggcgcgggtcaagtggaaagctcttttgcatagtaagatgagggtgaggtagccagccttcctcctgctatgtaaacatcacacctaatcgaactgatctgtgggccctatgtaaatcagacaccgcctcttcaaacctgcctaaaaatttggagaattccgccccagcaagtctttccctttcagaagccccgctctctcgctagagagaaagctgttctcctttctctttcttctgcctattaaacctgcgctcctaaaggcctcctttgtgtccctgtcctaaattttcttggcgccaggtaacgaaccctgggtatttaccccagacaacgaagccgcttcagaatgacaaaacaacagacatggggacttctggcaaacaataaaccacaaatgaacagagagagattagaaaataaatctaatcacagcagaggaggaggggagaaaatagcttctcttcccagaaacacaggagagacagaaagcaggctgccctgttctgcgcctgctccattctccagtaacataccgtcctggtgtagtgagacttttcgcattatagggcccaactagagatccagtcatttttacttacgctgtgagccaagattctgagtaaatgggtttatcttgattgcagttaaagtatctggttgggcacatcctaacatgaatattataccaacaataaaaatcgtggaaatgtggggaaatgtccacgatatgttcataacttaaagtaggttagcagtgcattgtcaacgtaaataaaacagtatattgagtgtgattccaatattgaaaaacaaaataaagagcactaaatctgccaagttcaaagaccagagtgccagatgcaaaatgtttaatgtttctttctgtgatgggattatttttttctttatatttttctgtatttcctgatttttttctacaataatcatgtttctactgtaatctgagatataaaacattagaaaatttggtcagatgagttgttccaggattgtgattatttctccacaaacagatgctcctcaactgataatgggattttgttcctataagcccatcataagttgaaaataccgtatgtcaaaaatgcacttcatacacctgacctactgaacatcatagcttagcctcgcctaccttaaacatgctcagaacacttagattagcctacagttgagcaaaatcatcttatgtaatttattggctaccataccgaaagtgaaaatcgaatggttgtgttgttcgttgaagtatggtttctacaaatacatattgcctttgtgccatcataaagtcaagaaattgttaagtcaaatcatgagtgagggatcatctgtacattcatacacacacggtatgaatacatgggggtgtgtgtgtgcatgtgtctatgcatgtaaatgtgtgtttcaaagctctggggtccttcttccttcccagctaggagccccttttcctctgctgagctctcgaatcttgcataattgctcaccacatttctgaaaagacaatctcttggtacagcacccccagccttctaccaagggattccagcagatgttcactcccagctcagcttggatagggccaccaaggagcctgcctttggtctccacagtcacttcctgaagtaagattgaagagggtgggagcaccatggtttgttgacctccagctctgcttgtatctcctttggcagaaggggtcccaggtggtgcctacattctagattttagagaggacaccacctccagagagctgaacccaaaaactgatgagctccaaagacgtgaaaaaggacagaccctgccagacgagcacccttaggttgttggcacggaactgagggaggaaactgggactacccgcctgatgttgcagcttttttattctcccctcgtcactgtgagaggtctggacttcttctgacataaacagcctcctttcatcaaaggatcgtgccatcctttctattttctaagcattaaaaggcagtttaagcagatcagtgaattaggcaaacgtttatattctcccttgcccttttctttttgcatctggtagaatttctcctgttctattgttgatctctttgtaaaagcc

SEQ ID NO: 100 - DNA, 4108 bp, Homo Sapiens
ccggccgtctatgctccaggccctctcctcgcggtgccggtgaacccgccagccgccccgatgtacagcatgatgatggagaccgacctgcactcgcccggcggcgcccaggcccccacgaacctctcgggccccgccggggcgggcggcggcgggggcggaggcgggggcggcggcggcggcgggggcgccaaggccaaccaggaccgggtcaaacggcccatgaacgccttcatggtgtggtcccgcgggcagcggcgcaagatggcccaggagaaccccaagatgcacaactcggagatcagcaagcgcctgggggccgagtggaaggtcatgtccgaggccgagaagcggccgttcatcgacgaggccaagcggctgcgcgcgctgcacatgaaggagcacccggattacaagtaccggccgcgccgcaagaccaagacgctgctcaagaaggacaagtactcgctggccggcgggctcctggcggccggcgcgggtggcggcggcgcggctgtggccatgggcgtgggcgtgggcgtgggcgcggcggccgtgggccagcgcctggagagcccaggcggcgcggcgggcggcggctacgcgcacgtcaacggctgggccaacggcgcctaccccggctcggtggcggcggcggcggcggccgcggccatgatgcaggaggcgcagctggcctacgggcagcacccgggcgcgggcggcgcgcacccgcacgcgcaccccgcgcacccgcacccgcaccacccgcacgcgcacccgcacaacccgcagcccatgcaccgctacgacatgggcgcgctgcagtacagccccatctccaactcgcagggctacatgagcgcgtcgccctcgggctacggcggcctcccctacggcgccgcggccgccgccgccgccgctgcgggcggcgcgcaccagaactcggccgtggcggcggcggcggcggcggcggccgcgtcgtcgggcgccctgggcgcgctgggctctctggtgaagtcggagcccagcggcagcccgcccgccccagcgcactcgcgggcgccgtgccccggggacctgcgcgagatgatcagcatgtacttgcccgccggcgaggggggcgacccggcggcggcagcagcggccgcggcgcagagccggctgcactcgctgccgcagcactaccagggcgcgggcgcgggcgtgaacggcacggtgcccctgacgcacatctagcgccttcgggacgccggggactctgcggcggcgacccacgagctcgcggcccgcgcccggctcccgccccgccccggcgcggcgtggcttttgtacagacgttcccacattcttgtcaaaaggaaaatactggagacgaacgccgggtgacgcgtgtcccccactcaccttccccggagaccctggcgaccgccgggcgctgacaccagacttgggttttagactgaacttcggtgttttcttgagactttttgtacagtatttatcacctacggaggaagcggaaagcgttttctttgctcgaggggacaaaaaagtcaaaacgaggcgagaggcgaagcccacttttgtataccggccggcgcgctcactttcctccgcgttgcttccggacggcgccgaccgccggagcccaagtgacgcggagctcgtcgcatttgttataaatgtagtaaggcaggtccaagcacttacaagttttttgtagttgttaccgctcttttgggttggtttgttaatttatacaaagagattaccaccaccaccccctccttcagacggcggagttatattctgggttttgtaaaactttatgtatctgagcatttccatttttttttttgggttttgtattatttcttgtaaatgcattgtgaaaaattttattttcggcgttgcaatgcggggaggagaagtcagattatgtacatagttttctaaaaagcctttcttctaaaaacgaaaaaagaccccccacccaaaatgtttcgagtcaacaaatttaagagacagagcccattttctccataaatttgtaacatgctatttttatgtgcatgttttatgagttcaaaatgcaatgaggaaatctgacagggaaattatctgtatgaactaaaagtaagggaaccccggggaatgggaggacaggatttttcaaggaacctttttcaatgaaagagaaggaagttaaaacctataggttattttgtagagctgagtgttaatacgggccgagaaataaaagtatcttctgctccggctgtttcactgcggacggctggggctgctgcgcgttaccttgctgcaagcggggcgccttccacctggctgggggtctgcgccacagtttggtccagaggagggaggaggaagggaagaccccagtggtgggaccctggaccaggccatggatgaaggacaaagaccagggcaggtcacgggtttcccaattccccagcaattaagatttcgagcagaatttatctaaatgtgtttcaaggaaacacaatcgctgaaccaaaacgtactgcagccgagccccctccgtccatcctctgcccctccccctggcttctttctcttgggaaaacgggcaaaataattgtgctggattctcacacacacagaaatatcgaccatcaccctcccccgcgtgaactgggatgcaagttgctaaccgatgtgaacgcaaaatgccttgttcattattcctgacgagatcttgaggttgtttgatgctttaaattttttaattatattattttctaggtgtttattggtacattgcagttttttttttgaaatttaaaaatttctgtaaaactttgtcttcaagtaatctgacagcattaaatattgcatttaaaaattatactgtagcaaatacatttaaaaattaatcacaacgttaagatgaaattatatttttggaaaaaaaaaacacttgaagcccagatggaaatacgtttatttcagcagccttaggtttcccctcgctttctcaacacccttccttgtcctggagtatggactgtccgtccaaaagtgagcctatgctataagtttaatgagaaccgaattcagcctgcattcgagaatagctttaagtataatgctgatctgacaattgacgtgtaatttgggaagtcattttgataattttgcttaaaccactcattcgttaaagtgattacaaaaaagttcaagaatgatgtccactgctttctaacaagataataaaccccccccctcttttctttttctttatttttatttcttttagctatttgatcctttctgaagcagttgtttctggaagagtctgtgcgcccatggatggctgagcaccactacgacttagtccgggataagggcctccccagtcctctccgggagatgatttgggaaattttataatgcttgttctgttaactcaccgggaccttgagggtccaatgggaccttgagggttttctctgaaatatacaaacttaaaggactctctctgaggttctttgactgacgtccactctcagtctggcccctgtgctcccctgtgtgtaccctggagtttctgtgtccaattgttggcatctaggtcttggctcaagattaggatgtgggccccactttagaggcacagactatgaaaagctgagttagtgcgcccgggacgccaggcaagcagcttttacagtttggcatcttattgcaggtgcttcgtgcacagtcagctgaaatagccaatgccaggtgctccaaccaccttatttccttgttttgttgattagaacaacacagaaaaaagcaaatataaatttttaatgactccatttaaaaatatcacagggtgggggcaaggaaattagctgagattcatctcaggattgagattctatccccccttccccgcccccagcagtgtcgctccaattcaaattagtggagaaaagattacagtaggccctgagccgactgtgaattcggtgcttggccaaggtaacactcatcgtattcacggagtgaaatactatatgatgatagttattatattatatgacgacttcattcacttcccaaatcacagggt

SEQ ID NO: 101 - DNA, 29262 bp, Artificial Sequence
  chemically treated genomic DNA (Homo sapiens)
ttaagtagaaatgtagtttataatttgtaattgttgtattattttttttcggtaggttagttttttttttatttgattttgaaaattatttggtaggagagagagatagagaaagattaattaaagtgtaaaatttatttttagtttagttagtaaaaatattattgatagttttatggatagtttttttatttttaagtattttttttataggtaaattatatgtttgtttgaagaatgtttttaatattttataatttaattagattagatagtaaattttgagtgtgttttatattttatagtattttatattttatttagtataattttttgtatatgattatatagaaatattttatataattatgttttttaatttttgtatatttgtgtaaattataggtattgggagtttttattgtttttagaagtttagtaagagttagtagggtaggttttagatagagttgagtatgggaaatgttgttttttttgtatataatatttttcgggtaaataagatgtgagtttgtgaaaaatgtttgtttggttttattgtagtttattttatttttaagagagaatatttcggtttgatttttttgtgtagtaaatttttttattttgggattagttttattttatgtttttgttttgttttggtgtttttttatagattttattttaatttgagaagaagagaattttaagagatattgttatgtaaaatatttttgttattttatatattgattatatttattgtattagggaaaaaatgatttttaaatgtatagtttagtgttatattttttttacgtgatttttttaaaagtgtggacgtggttaattttgtttttttttgtattgaaggagaaatgagtacgattttttattgaatttgtggttgatagggtagtagtttgaggaaattagaaattttattattatttttttttttttttttttttttatttttatagttaattggtgtgtgagttttatgtgttttattattatatttttttttttttgttattgttattttttacgtgtaggtattttatttttgaattatttttcgattgattatttgttattagtttttttttttttaaatatttttaattttttgtttaaaaatttttaatggttttttaatatttttaggatagtaaattttttattatttatgagattttgggtatttagagatgaaaaggttttgttttttttattttttttaatttttatttttttatattatttgaattttttatttaattttaaatatgtgttttaattaatttttttaaaaagatttaatttttattgttatttttgattttgatgttaaagttattgtaatagagggaagtatgtggtgttatgtaaagattgagagaagagttgttatttattttgggaatattagaggggagagttgtttgagtagatacgtggagaatagtattttatataaagatatggaaggaggagaggggaattgtatatggtttagttggttgtagtcgagggtacggaggaaattttttgtattatattagttattaaattattttttagtttttaattatgtattatatttttagtttttgtgtttttgtttttgttgtggttttgtttttgtagtaaataattgttttttttttaaagtttagtttagatgttattttttttaggaagttttttttaattttgtagttttttttgttagaattatttatttatttttttttgtatttttttagtattttgtttatatttgtattaatgtatttataatatatgttatgattagttgttatttatttgtttttttgttaaatagttgagtttttagagggtaggaagatacgtttagatattttaaaaatttttaaggtttattatagtgtttggtatacggtaggggttagttaataaacgaggagtaaaaatatatagaattatttattagtaggttgagattttgttatttatagtaattattttattttggagttttagatttttatttaaagaaataaaggtgtgaaataatgtgtttttttaggtgtttttttgttttagtattttaagttttgatgataggtcgagtgtggtggtttaagttaataattttagttttttgggaggttgaagtaggaaaattgtttgagtttaggagtttgagattagtttgggaaatatggaaaaattttgtttttattaaaaatataaaaaattatttgagtatggaggtgtataattgtagttttagttatataggaggttgaggtaggagaattatttgggaagtcgaggttgtagtgagttgagattgtattattgtattttagtttgagtgataaagtgagattttgttttaaaaaaaaaaaaaagaaaaaatttttggtgataaaataaattgatttgattgggttttatgtatttatttgttttttttgtgtaggggaagtgagggaaagattttgatttatattagtaataattaggcgaaaggtattatgtgaggagttagtatttattttattaggttaggatgttttagaggtgggtttaagggtatagggtaataggggaattagttttttataaattgttttggttttaatatttggttttgcgttgtggttcgtaggtttttaggaagattagtgtggttttagatattggagtatatggtaagtatggttttttttgtgaagaagaaaatttttttttgagtttttagggatttaagatgtttttgattagggtggtaaattaagatgaattaggaaggaggggttgtttgaagtcgattaggttggagtatttttttgggattatagaagattttaattttagaggagggaatagttaagggtaatttagagtggaatgatgaaaattagttttaatttaatttatgtttatttttttatgatagtatatttaatataattttttaagttaaaatgaaaaataaaaaagaagttattaaagtattcgaaataatggtaaatttttttttaagattggagtggggaagagtataaaaggtaaaaattgaaaaggaaaagattggttgatttgattagatagaaatttaaaattttggtatgttaataaattataaatagattaaattttttaaatataaaatattatagttaatatttaaaggtaattgatataaattaaaaaatatttgtaatatgttaaagaattaatattttagtataagagggtttatataaattaataagaaaatgaatatattaatagaaatatggggagagaatataaatgggtatttataaaatatatgaaaggatgttagatatatgaaaaatgtttaatattattagtaatgaaagaaaaggaaataatatgaaatattaaaatttttttttaagttggtaaagattaaatgaagagatgatatatgttgttttaaagatgggagtagaaattagttgaaattttttggaaagtaatttgaaattatatgttaagatttttaaaaagtttatattttttaatataataatatttttaggagtttaatttaaggaaataatagtggatatatgtaaagatttagttataagggtgtttattatttaaaatttggataaattttaatgtttaatataatagtatatttatatattgttgtgtagtaatagaacgaggtatattttagttaaaataaaaaggaagtaaaaaatgttgtgtattatattttattttgttttataaaagtatttaataagtatttaaaaaggttgaaattttaaaatgttaatattggttatttttaggtggtaagattatgggtgatttttgtttttttttttttttatttttgtatatttaaaattttttataataaggatgtgtatagtttttgagatataaagattgttaattggtaaatatataaaaatttaaaattttttttatgtttttttttttttttttaaatttgaggtagagttttattttgtcgtttaggttggagtgtcgtggtatgattttagtttgttataatttttgttttttgggtttaagcgatttttttgttttagtttttcgagtagttggggttataggtatgtattattatgtttggttattttttttgtatttttggtagagatggggttttattatattggttagggtgtttttaaatttttgattttaagtgatttatttgttttggttttttaaagtattgggattataggatgagttattacgttcgattatattttttttatgttttaaaggttgatgaagatagagtttaattggagatggaaaaaattattaagttaatttttgtaatgagaattatttataatttaattatttttggaaaatgataatacgaaaggaagtagtaaagaagagtattgaagtgtagtatgttagttaatataatagtaaggttgtatattgtaaatttagatagttggaaaagttaaagggttttttaaatagtaataaaaagtatttagtttatatttttagaattataagtaagaagataaatttatagggtatatttggtttatatttggtttatttggaatgttttaagtaagtagtgggttttggggtttaatttgtttataaatgtttttattttgttatttttatttttaaagaattattgaatttttttttttttgagatagggttttgttttgttatttaggtttgagtgtattggtgtgattagagtttattgtagttttgattttttgggtttaagtgatttttttatttttgtttttttagtagttgggattatttgtgtatgttattatatttggttaatttgtgtgtatgtgtttgtgtagagatagggttttagtatgttgtttaggttgattttaaatttttgggtttaagtaatttttttgtttcgattttttaaagtgttgagattatagatttgagttattgtgtttagttaaaatttaaaaaaaaattttttttatagttattttttattgaaaggagtttaatttgtatagtattttggaatttgttttgttatttcgattttgtattttattttttagagtatgttataaaaagaaagaagaaggaaggaaggaagggaattattgaatataaaatgaatttaataatggttatagatgaaagatgtagataattatatttagggagatgagatgtagtttgtttttaataataaggatttttaatagtaatttggaagagtaattttttataagaatttaaaatgatgatattttagatgaaatttaatattttttataaagttttatttattagtgtttttttgtaataattaattggtttttttatttagtttttgtaagtgttatgaatttgttattagatttgtaaatttaaggatttaatttatgagttttggatatttatttttatataagtttttagtgatttaattttattttttattgttagttttaatttttttgggtataattttaatgtttttattaattatttattgagagtatgttatatatttataatatgttaggtgttgtaggtggtaatagaagaatattttgggtagtttttttttgaatttatttataatgtgggttgggggagtggagagtaatacgagtgaaatagaggaggagttaatatagaaaatttatggtattagaaatgaatataataggattttagaaaatcgtgtttattgtaagagtggaaaggttttttggatgtggtaaaattttagttgtgttttagataagaaggaggatttggatgaggggaggcgttttggattagaggaatacggtgtgtagaggtggagggagaggggtgagagtggtttgttaggtaattggagttgagtcgggggagaagtagaaataagggtggagaggttgggggaggggtatataattatgataggttttgagagttagttaatttagatatattatgatatatagtgtaaatcgttttagttttttgaggtgaagattttgtgttaaatttagagttttaggaagatagggttaagagtagtaggtagaaagggttggagtggagaagggaggtgaggatgtaggttattttgttggtgacggttttttttatttattgttatttttagtaggttttaggtttggggttaggttttgaggttttaagatggttaatgggaagaaataaaaatgaataaaaattatagtaaaacgatgaatgttgtaataaaggaaggtatagggtgttggaggaaaagagaggaagaagagatataattgttggggaaggtgtatataatgtagtggtaaatataatttttggatttatagttgtaaaaatgattagattagtgtgagtgagggagtttggaatggtggaattgggagttatttttaataatttaatttgtttaattgaatatgatttttattgtaaaatatgtttgattagttattttattgttattttaaagtaattttgataatggtggggttttttttaatttatttttttaaatatttatttttatttaattttagttttttttttttttttagtatattttttttatttttttgttgtgttttattcggttcgttgattaaatttattgtttagtattaaaataagttttattttttgtttttttttttatagtgatagtttaataaatttttataagttttggttttttatattagttggtttattatatagttattataagaatgttagtattaaattttaaaatagtatatagtagtaataatttatatttaatagtaattattatttatttgttattatgttaagtattttatgttttttatttatttaattttttttataattttaagaggtaggtagtagtattgttatagtgttgaaaagagattagggaatttttttaaggttatttagttagtgagtagagtagttagtatttatatttggaattttttttatgatttgttatatttttttgtttttgttgtaatggtaaatgtttgttttgttttgtttttttttttttagatttttttattagggttatgtataagtattagtggagagtagttttggaagtttttgttttagtaagcgtagagatttgtttgtttttttttttttttttaattgttgttttttaaatgtggagatttgtttttttttttttatttttttttttttttttttttttttgtttttttttttttttttttttttttttttttattttttttttttttttttttttatttgttttttttttttgttatttttatttgtattttttttatttttacgattatttttgtggtttttattaatttttggaattacgataagaagttaattttttttttttttttttttttttttttggagacggagtttttttgtgttgtttaggttggagggtagtggcgtgatttcggtttattgtaatttttgtttttcgggtttaagtgatttttttgttttagttttttgagtagttgggatttatattattatattagttaattttttatatttttggtatagacgaggttttattatgttggttaggttggttttaaatttttgattttaagtgatttgtttggtttagttttttaaagtgttaggattataggcgtaagttattgtgtttggttagaagttaaaaatttggatttaagtttagaaatgtttttttagagtttagtgttgttttttttttttttttttttttgttttataattattattataattgtatttattttgtgtttagtatgtgtatagtattttatataggttttttatttagtttttttatttttttaagcgataggaattatttgttttattttatagtttttaaggttatataattagtaagtagtagagtttgaaagtgaatttaggtttggtcgatttttgagtttagatttttaatttttatatgttatagtttttagtttaggtttatagtgttttaagtgaattggattttaagtgtggtgattgtgagtatttgtttattttttagtaaaaagttttgtaaaatttttacgagaatttttttatgttttttttcgatgaggttttgtaaattttggtttttttttttttatttgagtgaatttaaatttgttttttagttttacggttttttatatttagttaataagtatataatgtgtatttgttatttttattcgtgtgaaattgattgtttttttgtggtgtatttaaattacgtattatttaaatttgggtatatatatgttatttttttggttagtggagtatgttgtagatgaaaaagaggaaaattttttttgttattgtttaattgaagtgttttatatatgtggtaattatagaggatatatattagtgtatattaaaatgatgaatgagaggtttgaattgaaattggttagtattgtaatattttaatattttgtttaacggaaatatgtattatagagtagttattatgaaaaatataaattattatggattatttaattttttagaatgaatatgaattggtttttattaatgggatgaattatgattatagaggttttatagggagttagaagggtatgttagggatttaatgggatttggatttattttgttagatttaaaagtagggatttgtaaatttaataattagataaatattagttattgggaaaacgtatttaatgttttttattgggggtaaggaattgtgtagttttttttaagatatagttttaaaagttagagaattttagatttttttaaagtatttgttttttatggttttaaagatattttaaatgttttttttttttttaaagttataagtattataatatttttaattatgttattaaaagttattggttatttttttttttttagttttattttaaagttttgtaggtattttttgaatttaaaataattgaagtattatgagttttagttttttttggagtatgtagagaggatatattttgtagatttttttattttttgtggttagagtttttttttattatgtagttatttttatattttgaatttttattaaatgttttggttaaatttagtttgatatgttattaggaatttggtgttatttaaaaatgttatttaagtgtgttatttagttgtgttagtgattatatttaggaagttttaatgaatgaagatttttaggttgatattattgaaattattataattatttaaaaattttttagatgttgatataggaattatttggtataggaattgttaatttgagttttgtgatttttggattaataataagaagtatgttgatattttaaaaaagtgttttggaaaaaattaattttaaatatatataattagaaaaataagtttgtaggttaggtatagtggtttatgtttgtaattttagtattttgggaggtcgaggtgggcggattatttgaggttaggagttcgagatttgtttgattaatatggtgaaattttgtttttattaaaaatgtaaaaattagttaggtgtagtggtgtgtgtttgtagtattagttatttcggaggttgagataggagaattgtttgaatttaggtggtagaggttgtagtgagttgagattgtgttattgtattttagtttgggtgatagagtaagattttattttaaaaagaaaaaaaaaataagtttgtatattatttttttatttttttttttttggagaggtaatatgattaaattaaagttcggaaagtttgaaaaatattattgggatgtatttgtttagatgtgatttagattagggtaggtgaattttaaaaatttggatatttattataaagttttaggaaattttaagattttgggagtagaattaatagtttttaggttataatattttttgtttttaaatttagaatggaattttaatattaaatatggatgggaaatttaaaattattaaaattataataattttatttaataaaatagattgtgtatattgagtttttaaagtttagatttttatatttatatatattttaagtattaggaagttattaggaataatttgagaatgaaagttaatttttttttgttttttttattttagagaatgtaaatataaagtagtttttttgttttaaaatttataatcgaattatatttaaatatttaaatatatttatatatttaattatatatttatatatattttaaaatacgtataatatgtatatatagatatatatatatttatatataaatattaaaaggtttttggaagaaattttatttgtgagttaatttaaagtttaaataaaattaaaatttatgaatatttaggtagattatgggaagattgtgtgtgttttgtataatcgtttaatatttagaattatatttttaagtttaataatagaaacgtaattaattattataaatataatgaaataaaagtgattttttattgaatattgggaaagatgtgtttttttttaatatttggaatttttgttttagtcgttttcgtaaatttatttgtttaaataaaattttttgaagtttttttaataaaaaaaagaagagttattttattaatttttataaataattttttagagaattgttatatatggtaatttattattataagataaaatattttattagtttaaaaagtgttgtatagatataggatagattttgtgtagaaatttatgaatataaattaatgtaatatattattttaaagtattatattatagtgttatgtattgattgatatgtatgtattaattttaattatatttatttaatggtttatatattatttatatgttgtttgttaagttaaaaatatggtggagaataaaaatatttttttattatttttatagtcgtttaaagttaagagaagttttatagaattgaaatttttatttatttttttttatattttttatatttttttttagtgaatgaggtgagttggttttttgtgtatgtttattttttaaaaaagtaggaaaaatattattagttttgtgtaggttagttttgtaagtttttttttatatttttttttaatatttgtaaaatagtttatttaatataatttgaaattggaagtttttataattaaatgttgtttttatttattcgtatataatttttttgaaatacggaggggaggtgtagaaaaggagggtagagtttgtttggtttgtgatggtagttttcgaaaagtagatttttgaagttattttttttttaattttttatcgttatttatttttataaggaaggaaattgttagaatgggtaaaagaggagtttggatagttaagatttttggtagaaatttgattggagttttattgttttttgaagggaggaagtttggtttgaatggaaaggtttttaagattagaggtaggtgtttagttttttcgggttattaaaatttgggatattgaaaaagaaatgtgaggaggttttgagttgtaaatgataagtttggaggggttttttaataattgatagtttgtttttttttaaaaaaaataatttgggtcgggcgcggtggtttacgtttataattttagtattttgggatgtcgaggcgggtagattatttgacgttaggagtttaagattagtttgattaatatggagaaatttcgtttttatgaaaaatataaaattagttgggcgtggtggtgtatgtttgtaattttagttattcgagaggttgaggtagaagaattatttgaattcgggaggcggaggttgcggtgagttgagattatatttttgtattttagtttgggtaataagagcgaaattttattttaaaaaaaaaaaaaaaattaatttaaagttaggtgtggtgatttatatttgtaattgggaggttgaggcgggaggattgtttgaggttaggagttcgagattaatttgggtaatatggtaaaattttgtttttataaaaatagaaaaattagttgaatgtggtgatgtgtatttgtagttttagtaatttggaggttaaggtgggaggattatttgagtttaggagattgaggttgtagtgagttgtgattgtattattgtattttagtttgggtgattttgttttaaaaaaataaataaataaataaaataaaaagtaaaaaaaaattaaaaattaatttaaaatagagataaaataagttaatttatattagtttgtaaatagtgatttgtttgttgatattttttaattgttttttttcgattaaagaaaattatattgcgtataaaggttagatcgttatttttatttcgtttatatgttgattaggatggtaagttaagaaaatgtttttatttatagttatgaattgagtttataaatttggtttaaataaattagaatttaattatttaggtaattagaatttttaaaaaatttaattttttatttttaatgtttatataatttaattaagttttttatttttgtttgaagaggtgtggtagaataaataaaggggttttgaggttttatggattttttttttttttattttattttttttttgtgtttttagagttttttgtataggttttaggtatggtgttgtttttttattttttttttttagttagtgggttatgtgttatttggcggtagaggttaggtatggttagtgtttagtatagcgttgaatatataataagtatttaataaagggtttgtagttgtttttgaaaaggattttaggaggtcgtaaattttaaattatagtaagcgggggttagaatttattaaagatttttttattatttattttttttagtaaaaattaaaatgtaatggttttgggtatttgtagaagtacggggagatttttttgttgaggtaaaaatttttgtaaagagggaaatagaatttttttttgaagtgttgatttataatagtattatggatagatagggaaatttttaatatgatattattaatggtaatttaagtgtattttatttgatgattgtgaggagtatgtttgtgtgtgtttgtgtatgtgtgtgtgtgtgtaggtaaatatatttgtgaaaatatatataaatattttaggatatatgtattattagaggaaggagtttaataatatttttggtatttttaagttttttaatagtaagtattttttttaatatttagattagatttttatagttttatttttatttttattttggatatgatttttttataggtttagatgtatttttgaattttgatattttggtttttttttttatataaaaagaaaatagagaggaaatatttgtgaagtattttaaatatagattttaatgtaatttttagaaaaatattgttatttaaaataagagtaatatgaaggttgataataaattattaatgggtaaattaagaaaaatagtattttgagatgaagatatatgtatattatgtgtagttttagttaattagttaaaggtgtagaagttttaaaaatattggtatataatattgaatttgaataagagaagaaagaagtatgtatgtatttttgtatttatttgtagggtataatgatattattattttataatttttttaattatttaaagtatgatttaaatgagatttttatttttgaataggtaattttagaaattatagttttattaaattatagattagattttttttgatttattagtatattttgtggattgtttattttatattatgttttagttagatagttgaatttaaaaattaaaatatgatatgtaaaatgtattttttttttattttataattagtagttttatattggtatgaaattattaaataagtagttagtaaatggaaattatattaaatataggtaaatttattgatgatgttaataaaaagtttgtttttttattagttttgtagaggttttattaataatttgtattggtatttattttaaatagatattttgttgtattttttgggtaaaatttgttaattttgagtttagaggattcgaatgttttatttataaagggtttttaaaatggttaaatgttaggtaaataaaaagtatagaagttttcgttgttttttgtgtattttttattggattgttgtttttcgtatattattaatttgtgaaaattagattgttaatggtggttaaaaatgatttttgggagtttggatatatttgtttattattattgttaatggtttttatttggttaaaaaaaaaggtagtttaatattagattaaataaacgtgatttagttgatagtgagtttttaatttttttaaaaatttttttaggttggttatattttatttttttagaattaatgaatgggtttggaaatatttttaaagtgtttatttttttattttttatattttttttattttttttgtttttaaatatggattgttttagaaatttgtatgttatttttgtataggggttatgttaattttttttgtattgttttaattttagtatatgtgttgttaaagtgagtaatggattttttttttgaaaaaggggttggtgagttagatgtggtggtttatgtgtataattttagtattttgggaggttgaggtaggtggattatttaaggttaggagtttaagattagtttggttaatatggtgaaattttatttttattaaaaatataaaaattagttgggtatggtggtaggtatttgtaattttagttatttgggaggttgaggtaggagaatcgtttgaatttaggaggtagagattgtagtaaatcgagattacgttattgtattttagtttgggtgatagagtaaaattttattttagggaaaaaaaaaaagagagggggtggggggaagtatagtaattttaatagtgtagagttgtaggagagaaaattatatatggaagaagtatattttttggaagtttagttttaaatatatttaagattgtagaaaaaaattggtttgaagttggagagtaacgggtaattagggtataaaacgttttttgtggatggaagtgattaaaagttgttgttaaaggtttagtgttatggtttatatttgtaattttagaattttgggaggtcgagggagagtgtttgaatttaggagtttgatattagattgcgtaatatggcgaaattttgtttgtataaaaaagataaaaattagttgggagtggtggtgtatttttttagtttcggttaatttgagtgggaagattatttgagttttggaggttaaggttgaggtgagttattattgtattattggttattgtattttagtttgggtgatagagtgagattttgatttaaatataaaaaagaagaagaaaagaaaaagttgttgtttaggaaggtgtttatattaggattttttaagtgtatatttgtaggatattgtgatttgtatggtttttgagaattttgtttatttaggagggtggaggtagtatcgtgttatattagggaaattatattattgttgagtgtaattggagattagagagtttggaatgttaggagtcggtttttttggtttttttaaggatttttaatagtagtggttttatattttaggtgaatattttaatttatttttggttttgtttttatatgttattagaaattggaagtatgagaaagatgggtgagagaagtaatatgttgaagtagatatgagtagtaaatagtaaatgaggaggagatggattatatgaataatataaataagtaaaaaaaaaaaaaaaaaaaaatagttaatagatttaatagtattagtttttaaggtattagaataattatttttttttaaatattatggtaagtttttgtttaagaatttgtaatggttttttatggtttttattaaagattttattttaaagttttttttataaagtttttaggtttttttatttttgtttaatttgttgagttattttgtttttttttttgagataagttttcgttttgttatttaggttggagcgtatttatataatttaggtttattgtagttttaattttttgggtttaggtaatttttttattttagttttttaggtagttgggattataggtgtatattattatgtttggttagtttttttttgtattttttttgtagagacggggttttattatgttgtttaggttggttttgaatttttgagtttatgtgatttatttatttcgttttcgtaaaatgttggaattatacgtttgagttattgtatttggtttattttgtgtttattgtttaataggtatttattttttatatttgttgtttataattgttttatgttatttttttgttttaaggtgttttttttttttttttttgtgtaattaaaattagaatgttatttaagtttttttttgttaaggattgaatgtttgtgttttttttatttttaaattaatatatttaaattttaatttttaaggtggtggtattagagaagggggtggggggttttgggaggtgattaggttaggagggtagattatttatgaatgggattaatgtttttataaaagaaattttagggagttttttttttatttttttattatgtgaggatatagtaagaaaatggttatttatgaattaggaagagagtttttttattaattattgaatttgttagtgttttgattttggattttttagtatttagaattgagaaaaatagatattgtttaagttatttagtcgatggtattattttttttttatagtagtttggttagattaagatattttttttttataaggtttttttaatttttgtaaattttattgatttatttttttttgggttgaagttttaagtgtttattgtttttattttgtttttttgtatttgatgttttagtgttttataatattagtttggttttttttagttagaaaatatattttttgagggtagagagattttattttataggtaatttcgattatttttattttaggaaagggtataaatatattttataaatatttgttgtattttttaatttattttgttttgtaagagaaatattaattaacgttattttaaatttttagttgttatgacgagttttaaagtattaatttgtttttatatgtgaaaagtatattttgatttatttgtatattttgattaaattaggttaattatatatttagtttattggggaaatttgtgatgttttaatagaaaataagttttgtttttatttgatattttgaaaattttttttaggaataaataaaattatagtattaaattttaattatgatttgaaaatattaattagcgtatatgtttattgtagtttttaatagtaaaaatattgtatatttttagagtttatttaattataagagttaaacgaatggttaggtgatttgtttcgttggtggatatgagagaggagaagttgattaaatagttattattttttttaagttgaattttgaatttaataaataagagtatttaaatattgtgttttgtatatatgtagggtatattatgtatatggggtataatatgaaatttttgttatttgaataaagattaaaaaatgtggtatttatttattttttttatggaaatatatttttttttttttttattattttttttttttttttttttttttttttttttgagatagggttttgttttgttgtttaggttggagtgtagtggtgtgaatatggtttattgtagtttgtttttttgggtttatgcgatttttttattttagtttttagagtagttgtgttattatgttaggttaatttttaaaaatattttgtaggtttatttatgttgtttagtttggtttcgaatttttgggtttagggaatttttttgttttatttttttaaagtattgggattataagtatgagttattgtattaggttgtttttagttattttatttttatttggttttttattttttgttttggttgttttttttttaaatttttttttgagttaataattggtatttagaagtatggttttagttagtagttttagggattaagtggttgtttattattgaaagggttattatgtttttttagtattattgttgatattttatgaaaaatatttggagaaaatgttttgttttgattttttttaatagaaggaaaatgtttgtttatagaggaagtttgtagaaaaaaagaaagaaagtgtgttatttaattgtatatttataggtaaatttagtaaataattttttttttttttttttttttttttttttttttttttgagagggagttttgttttgttatttaggttggagtgtagtggtatagttttagtttattgttattttcgttttttggatttaagcgatttttttgttttagtttttcgagtagttgggattataggtggttgttattatatttggttaatttttgtatttttaatatagatagggttttattttgttggttaggttggttttgaatttttgattttaggtaatttatttgttttagttttttaaagtgttgggattataggtatgagttattgcgtttggttaatttagtaaataaaattattttagtttaagattgtgtttatatatgagatatatatgtattttaatatttggatgaagaaaggtattataatttcggttaagtgtttagatgtttttatagtttgtgtagatttatgtgttagttgtgtttgtgttttgttgtaggggagtatattttagaagagaagttattttttgtatgtaaagttgtaaataatttttgtatgttgtttttaatgtatttttttgtttttttatgttgggttgaggttttgtttttttgttgtttaatagtaggtatagggtttggttattgttgaataaaagttttacgtatgtatgtttaatttttaaataaattttgaattttaaaattgattttagttttataatttgtttttaagtgagattttttggattttttattttttttgtttttgatatttttagaggtataatttggatagggttaaagttaatttatagttagtgtaattagtatatttaagaataattaaaatatagtataatatatggtatagagaggtttttaaaaatattttgtattaagttattaaaaaattaattatataaaaaagtaaggttaaataatttttttttttattagtgggatatagatttttaattttttggtgttaaattttatattgaatgattttttttgtgatgtttggtattttagtgaggttatagaatagaaaagaaaaaaaaattaatattattggaaagtatatgttatagaatgaattaattaaatattaattttattagtgaaaaaaaaaggagtaagtgtaagattaattaatattagtgggattatagtaaattaagagttatggtaaattttataatttatgattaaaatttattgtaaggtgtatatacgttgtattttgaattagtaaattaaatatttttgattagtgcgtttcgagtttatttagaaagtttttgagttttagaattggttttgtgagttaatgttgtttaatttttttttttggatatttttttattgtttttttttatttttttgagttttatatttttaataattattagtaagaaggaaacgtttataaataaaaataaataaatatttgaaataaggaaattatttaattttgaatttatgtattgaaagattttaaaatatattgtatataattaaatgttgttagtaaattagagataggaggttttattaaattttataggtatattaattgagaaataaaatagtttaagggtttatttaatgttatttagtgagggaattaaaatttagatttattagtttatattttaaagaattttttttattttttgtttttttttaaaaaaattataagtatgtttaaaaatagaatggaataatgaattagagtgttttatttgttatatatttatgagaagtgtaattgttttttattatttttagaaatttgtttatagtatattaagtatattagagaattatattagtgaaaattaaattgattttaaaatttttatatatataaaaagatgtagttatgtttatattgtaatggtattagcgtttttttagtgaaggggattgaaaagtggggatgattttattttatttgatttttttgatttgtaatagttttgagttgttttattagtttattttattgtatttaattttaaattatttaattttattaaagttatttaaaatggaaatgtaaaattttattttgggattgtaattggaaatattgttatttatatttttgagtaggtaatattttgatgaaattattattttttttatttatttgatttgggtttaattttaaaggatttatagataaaagtttttttggtttttgggtaattttggttgtttgagaattttatgtttggttttttaattatatagaattatatttgttgtatgtaaggttaatgattattaatagggaggttttaaaaaaattatttaaaaatgtaatttttttaaaattaatgaaaagtaatagttattgataaggttgatagattaaagaaaggttaaatttaattaaaatgatgaattaaaatattaattggaataaagtattgttgttaaattgaattttttaaagggattaattaaatataggtttatatttttgtttagagaaaggttatagagattttttggttaattatatttatggttgttacgggagtgaaaaatttttataaaaattaaaaattgtatatcgatttattaggtagtttgaaaagatatttcgttttttttttgttatagttatataagtatagaaataaaatattgatattttttaataataatggttgaattaaatattggattggttaaagggatatagggttatataaattttattagatggttttttgtgtagattacgattatagtatttatattgtttttttaggtaatttgttttttttttttgattggaagtaatgtgagggtagggattcgtattgatttttatttttgaatttttagagtttaggaaagtatttattatatagtaggtatttaaagatatttgtggagtaaataagtaaataaataaatgaatgttattatgtagataacggttgttatatgggggaaaatatttttattaatgagtaaagaatattggataaaatatttggttgttattattttaaagtagttaattataagcgtttataatttttttggtttatttgaatttttgatattttgttaaataaatggatttttaggatttgattataagtaaatatattaatattaaaatataggttatttgggttttagtttgggatttttttaaatgtgtattttaatttgaggattataagttaattttttttaaaagtaatggtagttgacggtgtattaagttaagttttatatagtttaaattttttaaatatttattggtgtttaaaatatttttacgtgttaagtaaaaaataaaaaataaataaataaataaaaaaaaaatttataacgatgaagtttttgtgatttaagattttaagataaagttaataaagtatagtttttatttgaaatttgtttattttgataatatatttttattttttttatgttttatttgttttttatttaatataggataataagattgtataattttttattatatattttttagaataatgtgagaatgaaattgtgatatggaaaaattaatgtggaataagtttttttgggaatttgtattaaattaattattgtgaggtagggattagtaatattttaatagtattattacgtgttattattaatataattattgatcgtattgttttgagttttaggtattgtggaatttttatatgaatatcgattttgattgtatttttatttatttttttttagtatttatatttttattttaatattaaataatagtagatattatggtttttatttgtttggttattatttttaaggttttgatggtttgttagggtttattaggttaataagtatggggaaaataaattttttttaaagttaggaatttgtttttaaattttatttaaattagaggaagatgaaagagagaaatttagtttttaataaatatatagagattattaatatatatgaaatgaagagaatatagttttgtgaaggatttagtttgtttaaatatatttattaatagattgtttgtgggtatgggtatgtatggttgttgaaatgttaattgaaaattttttaaaaaaattatgaatgttagttgttaaatgtagtgtaggaaattaaagtttttaaaagtaaattttagattgtgaaatttggatttttttattaaatttatagaaaatattttaaatattaaattattttataattttgtatgaattattgttattttttgaaaagttattgtatatgttttattttttatagtatatttataaaaatttttatttaaatagagtttagtagaagtagatttatgaagattgatatttatttagtagataaacgaaatttagggttggggtaaagtttgatgtttgtttaaatgtgttattttgtattaaatatatgtatataataatttgaattttaatattattaatagtcgattttaaggtaaaaatttttaaatgtaggaagttaaaaataaattaaaattaatgtgtgtaaattataatgtattaattttaataagcgattttaaagtttgttttaatattggtgaatggaaagtaggttttatattttgtttttgaatgggttatgttatttaaaaaatatatagttattgttatatgaaagtttttttattttatttaattttaggttttacgggggtttgtttttaaaatggggttatatataagataaaataaaataaaataataatttttttaaattaagtttttgatagtgttattgagatgtgatattgtttttaaattttttttttgagttttgtttgttttggtagagaggaatgggaattttttaagtgtttattggtcgtataagatagatttagtaaaggtttttaatttattttagtagttgaaacggtcggaggtgatttgtatttattggagtatatatagattttttatttgtggtttttaggtatgggagaaattgggttatttttaaatttatttttagatatatagagttgttaaatattatttgatttgggattaaggaatgtttttaaaattgtttttttatatttatgaatgtgttgtttttagtggttattaatttttatatatattaaataaataaaagtaattgattatttagaaatgtttgggaaatggtaagatattatagaattaattgaatagaattataaatttttttttgtgtgagtgtatgtaaatttattagaaattttttggtagtaatgttttttattttaggttttaattttgtgaaatattatattagggaggaggtagtttttggaaaatattattgtttttgtgattttagagtgtaataggaaaatttatatttaataattttattatattagatatttagggtaaatttgtaaaagataattttatgaatttttaaaggatataaggttttaatatgtggaagtgataataataaaaatatttaaaatgtgttaataaataggtaatgttataatgtataaaatgatagtattgtgtattatatgtagatttgtggttattaattaatgatatgttataaaattattattaataattttttagtattattaattaaaatcgaatattgattaatatttatattatatttatgaaataatttggaaatatttgatgatatataaagttttttttttatgatatataaaatattttattttattaaagtaggtatttgttttttgttattaaaaatattgagaagtttttttatgagaaaataaaaataaaggtttggagattttttttattgtattttgtcgttatataagatttttttaagattttattttttttatttttgttttttatattatttttttttttttttttattttttagtttgttttttttgttttatttgataggtaaatttgtagatattgttttaggataataatttcgtttgatagttaattaatcgtgaatagttaaagttaaggtagtttgtattatataaatggaaaattagattttttttttttaagaaataaaattttttttttaagatattgtaatagataatttagtattaaaatttttaattacgttttttttaaattttttggagatatttagtaattagtaaaaggtggttttatttaatttgtataatgtaatttttgtaaatgtattatatattttgtgtagagattattattatggagataatataaatgttggtatagatgttataaaatatttttaatgtttttttgatagatattaaaagtaataagttgtgattttttttaatggaaggtttttaagagaatattttaattattgttattttatgtttttttagtttgttttattgtgtaatttgatatatttttgaatttttttttgaaatatgtttagtaattaataattttattgttattaatgttattgtttttttatttgtgttttttttagttatatttattaggaattgttttttatttttatttttgtattaaatatttagttttttgattatgaattttagtttttttttttgttatttgattatttattttttttatttgtttttagtttatttgatttttttttttaaaaattttttttagaagtattagagtttgtgatgaaaaagttatgttttttgtttttatttagaattaaaataaaatataaaatttgtaagtgatttaattgataagaggtatataaagatttaatttttttttttttgtagggaggatgttatttattatatttaagtttgagagttattaattttaaggagaaataattagaaggttttaggtattttttaaaaatgtggtaattatttagagaggataaagatatttaagaattttagtatatatttatgtaattgtgtatgtttagagggtagatattatttaaatgtaaagaagtatgttgagattgtgagaaatggtattgttatttgggaaattgttatcgttggtaaattatagaaatgttgatttttgaaatataaattttgatatttaaaaataaaattaaaaaagagtttataaattaatggttaaaaatagaatggtggtagtgggtaggtgaggaggttgggtataagttttatagaaatggttaaatgtaggtaagaaaagtggtagttgatttttttttttttttttatttgaaaagttgttgttattttttgtagatataattatttggttattttttttagttttttgattttgtgtggaaaagaattagatatataaattaatgttcggattaaattatatgttaatgttaatagttagtaggaagaagtattaataaaagtgattttatggagttttaggagatattattttttgacgattattttttgaatatttttttatttaaatatatgtgtatgattacgtatatttatattattattttttaagaagtaatatagattaattagatatatgttatgttatttatagaagtataggtatatgtttttgtaaataaatatattatgttatttgttaaatttatattttattaggatagatttatttcgttttaaagttttttagagtgttttttgtgtatacgtgagtgaatattgaatgtttagttatttaaatttaattttggttttttaggggttttaggtagtattttttagttggtattttttcgagaagagggtttatattgaagattttgttttttgttttattggatataatagttgtgtttattttggttaaaattgattaaagtagttaaaattgtatttaatttttgaagttaatgtattttttatttttggttatggtggaggggaggtattgaattatagagaagaaaaggggtagggtgatttaggttgtttcggtgttgtggttttgttttttttaggggaataaatgtgtttagttggagggtaaaggggattgttggattagaggaaggattaggttaattaaagggttttttttaatttttataagtagttagttgaaatataagagggaaaggcggttttaaagtttttgaaaggcgttattaagaaagggattagaaattatatttttacggaggattattggtaggaaagaagtttttttaaatatattgaatattttatttttgtggggaaatttggtgatttattttttttgcgtatatgtaatcgatttagtttaaaggtgtatttaaataataataattagtttgaaggagtttaaaggggatatttatatttttgtaggagggttgtttttttagtgatggatggtgaattgggttgttcgggttgttgttgtcgtcgttattcgttttttggggggttaggggcggcggcgggggcgggggtaggttcgagtcggggttttcgagtttttcgtttttttgtagtagtttggaggagtttaggtcgagcgggaacgcgttcgcgacggtcggcgcgcggtttcggttgtttttttttttcgacggttttcggttttggaggaatcggtcgttttcgattaaggggtcgtcgagtaggattttcgttttttcgttttttttttcgtcgtcgttagggtttcgattttttttttttttttcgttttcggggggtttgtggttttttacgtttattttttgtttttttttttcgtcgttttcgttttcggagttgttttcgttggggtagtagtagttggttttttcgggagatagaaggtttcggtggtgcgggtgttgggttagagggggcggcgggggcggcggcggcggcggcggcggggtcgggtggtggcgttcggaattcggttcgtcgggttgcgggggtagtagtagaagcggcgacggcggttgcggggggtggtggtggtggtggtggtggtgagggtggtgatggtggtggggatgcgtttgggtcgagtggggcgcgttcgtcgacgtttcgtgtagtttggttaggtttttcgcgtcgtttttgtcgtttattggtcggaaggcgttggaatggtggtagttgttatcgttcgttttgcgtttttttagaaggtgcggatggtggggcgtcggaattcgggagttcgcggggttagattcggcggtcgcggtttttgtttcggtagttgttatagagttcgcgggcggcgtggagttcgcgttgtagttttcgtcgttgtcgttcgggggcgattcgaagagcgcgtcgcgagagtcggcgttttcggtaggaggaggtgggtcggagttcgggtcgttggttattatttgcgggggttgtttcggcgggggcgcggtttcggcgtttttagtagtatcgtttggtttagttaggtttaggaaggtttggcgtagtagggtcgggttttcgtttagcgcgtagtttagcgtcgagggcggttgaggcgggggttgtaggtaggtgggtatcgggagttcgttaggggttcgcggcggttagaatatgtagaagggcggatagaaggcgtttttgcggttcgcgggttagaagaggtcggataagtcggttttgggcgtcgcgttcgcgtcgtttgcgttcgcgttttttagggttttagcggcggtattcgtatttttttttttatggtataagttgaaggcggcggtcgcggtagggaaggtgtaggggtgcgggaagagttcgtcgtagttcgggaatttttgtaggacgttttcgaacgagtttttgttgggtatcgggatgattgggtagttgcgcgggtttttggtttttgtttcggtattcgttttcgcgttcgcgtttacgtttacgtcggttatatagttatttttagcgtcgtttttattagttttcgcgtcgttcgaagtagtagttatagagaggttggcggttgcggtcgagaggttggcggcggttattacggcggttttttgtaaggagtcgtcgtcgtcgtcgaagcgcggtcgtttgtgatgggcgtgcggggtattagttagttttgttaagggcggcggtggcggcggcggcggcgggggcgtatttagtaggtgggggtttagtagattttcgttttcggttatcgcggtcgcggcggttacggcggtcgtttttatagagttgagcgggtggtaggcggggtgcgcgttcggttggggtagtgcgcgtttgcggttgtcgtcgttgaatatggttttgacgtttttttaggcgaagattagttcgttttggggatttttgtcggtgagtttgagatgacggcgttacgagttgaagttggttgcgtttggttgagtgtatttggcgtcgggcgtgcggtgggagtggaaaatgaatttgttgggcgagaagtatatgttgtagtagttgtatttgatgtatttggcgcgcgagttgttgtagcgcgcgggaatgaagttgtcgcggtagttttaggcgtattcgtgtgatacgtcgaaggcgaaattgtttggtagtttgggcggtttgttttcgtttaggaacgatttgtatagacgttcggtttcgcgtttggtgattatgtcgtagcggcgcgatgagatgggtatggtttcggtacgtcgtaggatttttagttgtatcggcgtgtattgtatatacgtgatgtttagtgttacgcgacggttgtggatttcgttgtagttgaagtttttgagtagagtgttggagatttgcgttaggtataggcgtttttgttcgtcgattattaacgatacgatgggaatgtcgtagaggattatttggtttatttggttgggtttgaggttggcgtgttttggtcgcggttggtttagcgtgtcgggttggaaggcgttcgacggcgacgttagtaggatgtcgttgggttttggtagcggattggaagttat

SEQ ID NO: 102 - DNA, 29262 bp, Artificial Sequence
  chemically treated genomic DNA (Homo sapiens)
atggtttttagttcgttgttagggtttaacgatattttgttggcgtcgtcgtcgagcgttttttagttcgatacgttgagttagtcgcggttagggtacgttaattttaaatttaattaggtgggttaggtgattttttacggtatttttatcgtgtcgttggtgatcgacgggtaagagcgtttgtgtttggcgtagatttttaatattttgtttaagaattttagttataacgagatttataatcgtcgcgtggtattgggtattacgtgtgtgtagtgtacgtcggtgtaattggagattttgcggcgtgtcggggttatgtttattttatcgcgtcgttgcggtatgattattaaacgcgaggtcgagcgtttgtgtaagtcgtttttgggcgaaaataggtcgtttaagttgttagataatttcgttttcgacgtgttatacgagtgcgtttggggttgtcgcggtagttttattttcgcgcgttataatagttcgcgcgttaagtgtattaaatgtagttattgtaatatgtatttttcgtttaataagtttattttttatttttatcgtacgttcgacgttaagtatatttagttagacgtagttaattttaattcgtggcgtcgttattttaagtttatcgataagagtttttaggacgagttggttttcgtttgggaggacgttaaggttatgtttaacggcggtagtcgtaagcgcgtattgttttagtcgggcgcgtatttcgtttgttattcgtttagttttgtgaaggcggtcgtcgtggtcgtcgcggtcgcggtggtcggaggcgggggtttgttgggtttttatttgttgggtgcgttttcgtcgtcgtcgtcgttatcgtcgtttttggtagagttggttggtgtttcgtacgtttattataagcggtcgcgtttcgacgacgacgacgattttttgtaggaggtcgtcgtagtggtcgtcgttagtttttcggtcgtagtcgttagtttttttgtggttgttgtttcgggcggcgcggggattggtgggggcggcgttgggggtggttgtgtggtcggcgtgggcgtgggcgcgggcgcgggggcgggtgtcggggtaggggttaaaggttcgcgtagttatttagttatttcggtgtttagtaagggttcgttcgggggcgttttgtagaagttttcgggttgcggcgggtttttttcgtatttttatattttttttgtcgcggtcgtcgtttttagtttgtgttataagaaagaggatgcgggtgtcgtcgttgaggttttggggggcgcgggcgtaggcggcgcgggcgcggcgtttaaggtcggtttgttcggttttttttggttcgcgggtcgtaaggacgttttttattcgtttttttgtatgttttggtcgtcgcggatttttggcgggttttcggtgtttatttatttgtagttttcgttttagtcgttttcggcgttaggttgcgcgttaggcgaaagttcggttttgttgcgttaggtttttttggatttggttgagttaggcggtgttgttgggagcgtcgaggtcgcgttttcgtcggggtagttttcgtaggtagtggttaacggttcgggtttcggtttatttttttttgtcgggggcgtcggttttcgcgacgcgtttttcgagtcgttttcgggcggtagcggcggggattgtagcgcgggttttacgtcgttcgcggattttgtggtagttgtcggggtaggggtcgcggtcgtcgggtttggtttcgcgggttttcgggtttcggcgttttattattcgtattttttggaggggcgtaaagcgggcggtggtagttattattattttagcgtttttcggttagtgggcggtaaggacgacgcggagagtttggttaagttgtacggggcgtcggcgggcgcgttttattcggtttagacgtatttttattattattattatttttattattattattattattattatttttcgtagtcgtcgtcgtcgtttttgttgttgttttcgtagttcgacgagtcgggtttcgagcgttattattcggtttcgtcgtcgtcgtcgtcgtcgttttcgtcgttttttttggtttagtattcgtattatcgaggttttttgtttttcgggggaattagttgttgttattttagcgaggatagtttcgaggacgaggacgacgaggaagaagagtaggaggtggacgtggagggttataagtttttcgagggcgaggaagaggaggaaggtcgagattttgacgacgacgaggaagaggacgaggagacggaggttttattcggcgattttttagtcgggggcggtcggtttttttagggtcgagggtcgtcggagaaggggagtagtcgggatcgcgcgtcggtcgtcgcgggcgcgttttcgttcggtttgaatttttttaggttgttgtaggaagacgggaaattcggggatttcggttcggatttgttttcgttttcgtcgtcgtttttggttttttagaaggcgagtggcggcggtagtagtagttcgggtagtttagtttattatttattattggaggagtagtttttttataaagatgtaaatattttttttaggtttttttaagttaattattattatttaaatgtatttttaggttgaatcggttatatatgcgtaggaaagatgaattattagatttttttatagaaatgaaatatttagtgtgtttaggagggttttttttttgttagtggtttttcgtaaaaatgtggtttttggttttttttttgataacgttttttaaaggttttggggtcgttttttttttttatattttagttggttgtttgtggaagttggaaaagattttttaattgatttggttttttttttaatttaataattttttttgttttttaattgagtatatttgtttttttaaaaggagtaagattataatatcggagtagtttgaattattttatttttttttttttttatagtttagtattttttttttattatgattaaaagtaaaaaatgtattggttttaaaagttaaatgtagttttaattgttttaattagttttagttagaatggatataattgttgtgtttagtgaaataaaagataggatttttagtatagatttttttttcggaaaagtattaattgaaaagtattatttgggatttttaaaagattaaagttaaatttaaatgattgaatatttagtgtttatttacgtgtgtatagaaaatattttggaggattttagggcgaagtgaatttgttttaatgaagtgtagatttgatagataatatggtgtgtttatttatagaagtatatgtttatgtttttgtaaataatatagtatatatttgattaatttgtattattttttaaaggataatagtgtagatatacgtagttatatatatgtatttaagtaaaaaagtatttaaagaataatcgttaaaaaatgatgttttttgaggttttatggagttatttttattgatgtttttttttgttgattgttgatattagtatatggtttgattcgggtattgatttgtatgtttaatttttttttatatagagttagaaaattaaggaaaataattaagtaattgtatttataaaggatgataatagttttttaggtaaaaaaaaaaaaaaaaattagttgttattttttttgtttgtatttaattatttttgtgagatttatgtttagtttttttatttatttattattattattttgtttttaattattgatttgtgggtttttttttggttttgtttttgaatattagagtttatattttaaagattaatatttttatagtttgttaacgatgatagttttttaaataatagtgttattttttataattttagtatatttttttgtatttgaatgatgtttgttttttaaatatatatagttatataaatatatgttaaaatttttagatatttttgttttttttgaatagttgttatatttttggagaatatttagagttttttgattgtttttttttggagttaatagtttttaaatttagatataataagtagtattttttttgtaaaaaaaaaaaaattggatttttgtgtgttttttgttagttggattatttgtagattttgtgttttgttttggttttagataagaataaggagtatagtttttttattatagattttgatgtttttggaggagatttttggagagaaagattaggtaggttgggaataaataagaggaatgaatagttagatgatagggagaggggttgaaatttataattaaaagattgaatatttagtataagggtaaaaataaaaaataatttttagtagatataattaagaaaaatataaatggggaagtagtgatattaatagtaataagattattaattgttgggtatattttagaagaaaatttagaaatatattaggttatataatgaaataggttggaaaagtataaaatgataataattgaaatgtttttttagaaattttttattaaaaaggattatagtttattgtttttaatatttgttagaaagatattaaaggtgttttatgatatttatgttaatatttatattatttttatgataatgatttttatataaaatgtataatatatttataaaaattatattatataaattaaatgaaattattttttattgattgttaaatgtttttaaggggtttgggaaagacgtgattagaagttttgatattaagttgtttattgtagtgttttaaggagagggttttgttttttgggaaaaaggaatttaattttttatttatgtaatgtaaattgttttggttttgattatttacggttaattgattgttaaacgaggttgttattttgaggtaatgtttgtaaatttgtttgttaaatgagatagagagagtaagttaggaagtgagggagagagagagagtggtgtagagagtagaaataaagaaaataggattttaaaggaattttatataacggtaaagtataatgaaaaaggtttttaaatttttgtttttatttttttataaggaaattttttaatatttttaatggtaaaaggtaaatatttattttaatgaaataaaatgttttatgtattatgggaagaaagttttatatattattagatatttttaaattattttatgaatatggtataagtgttgattaatattcgattttggttgatgatgttgaggagttattaataataattttgtagtatattattggttagtggttataagtttatatataatatataatattattattttgtgtattatggtattatttgtttgttagtatattttgaatgtttttattattattatttttatatattaaagttttatattttttgaaaatttataaaattattttttgtaaatttgttttaagtgtttaatgtggtaaaattattaaatgtagatttttttgttatattttaaagttataaaggtaatgatattttttaggaattattttttttttagtatgatattttataaaattgaggtttgaaatggaaagtattgttattaaggaatttttaatggatttgtatgtatttatataaaaaagggtttataattttatttaattgattttgtaatattttgttattttttagatatttttagatagttagttgtttttgtttgtttgatatgtgtagaaattaatagttattggaaataatatatttatgaatatgaaaaaataattttagaaatattttttagttttagattaaatgatatttagtagttttgtatatttaaaaatagatttaaaagtagtttaattttttttatgtttggaaattatagatgggaagtttatatgtattttagtgaatgtaaattattttcggtcgttttagttgttgaagtggattggagatttttgttaggtttgttttgtacgattaatgagtatttagagaatttttatttttttttattaagatagataaagtttagaaagaaagtttaaaagtaatgttatattttagtggtattgttaagaatttaatttggaaggattattattttgttttgttttattttatgtatgattttattttgaaagtaagttttcgtaaagtttaaagttgaataaaataagaaaatttttatgtagtaatggttgtgtattttttaaataatatgatttatttagaggtaggatgtgaaatttgttttttatttattagtattaagataagttttagagtcgtttgttaaaattagtgtattgtaatttatatatattagttttaatttgtttttgattttttatatttggagatttttattttggagtcggttattggtaatattaaagtttaaattattatatatatgtatttaatataaaataatatatttagatagatattaaattttattttaattttgaatttcgtttatttattagataaatattaatttttataagtttatttttgttgaattttatttgggtaaaaatttttgtaaatatgttataaaagatggaatatgtgtaatagttttttaaggggtaataatgatttatataaaattatgggataatttaatgtttaaaatattttttataaatttaatgagaaaatttaaattttatagtttgaaatttatttttaggaattttaattttttatattgtatttaatagttaatatttataatttttttaagaagtttttagttaatattttaataattatgtatatttatatttataagtaatttattaataaatatatttgaataaattaagttttttatagagttatattttttttattttatgtatattaatagtttttgtatatttgttaaaaattgaattttttttttttatttttttttgatttggatggaatttgaaaataaatttttggttttaagaggggtttgttttttttatgtttattgatttagtaaattttaataagttattagaattttaagaatgatagttaagtagataaaaattatggtatttattgttgtttgatattaagatggaaatataaatgttaaaaggaagtaagtaaaagtatagttaggatcggtgtttatataaaaattttatagtgtttggagtttagggtagtgcggttaatagttatattggtaataatacgtagtgatattattgaaatattgttagtttttattttataataattaatttgatatagatttttagagaaatttgttttatattgatttttttatattatagttttatttttatattattttgggaagtatgtagtaggaggttatataattttattattttgtattgaatgggagataggtgaaatatggaagggataaaaatatattattaaaataagtaaattttaggtgaaggttatattttgttaattttattttggaattttgggttataagaattttatcgttatgggttttttttttgtttgtttgtttgttttttgttttttgtttagtacgtggaaatgttttaaatattagtaagtgtttaaagggtttggattgtgtgggatttaatttggtgtatcgttagttgttattgtttttagaaaagattagtttgtggtttttagattgaaatatatatttgagaaaattttagattggggtttaagtgatttatgttttggtattaatgtatttatttgtggttagattttgagaatttatttatttggtaaagtgttagaaatttagatgagttaaagagattatgagcgtttgtgattagttgttttggagtggtagtagttaaatgttttatttagtattttttatttattaatgaagatatttttttttatgtaataatcgttatttatatgatagtatttatttgtttatttatttatttattttataaatatttttgaatgtttattgtataataagtatttttttagattttgggaatttagaaatagaaattaatacgagtttttgtttttatattgtttttaattaagaggaggagatagattatttaagaaggtagtatgagtattataatcgtagtttatataaaaaattatttgataagatttatataattttgtgtttttttagttaatttaatgtttaatttaattattattattggaaaatattaatattttatttttatgtttatatagttataataaaaaaagaacgaaatgtttttttaaattgtttgataagtcggtatgtaatttttgatttttataggaattttttattttcgtggtaattataaatatagttaattagaaaatttttatgatttttttttgaataaagatatagatttatatttaattgatttttttaaaaaatttagtttagtaataatattttgttttagttgatattttagtttattattttaattaagtttagtttttttttaatttgttagttttattagtaattattattttttattaattttgaagagattatatttttaaatgatttttttaaaatttttttgttaatggttattaattttatatatagtagatataattttgtataattgagggattaaatatgaagtttttaagtagttaaaattatttaaaagttaggagaatttttatttatagattttttaaaattagatttaagttagatagataagggggatggtagttttattaaaatattatttatttaaaaatataaatgatagtatttttaattgtaattttagagtaaggttttgtatttttattttgaataattttagtgaagttaagtgatttgaaattgaatgtagtggggtaagttggtaagatagtttaaagttattgtaggttaaggaaattaggtaaagtggagttatttttattttttagttttttttattggagaaacgttggtgttattgtagtgtgagtatggttgtatttttttatatgtatagaagttttaaaattaatttgatttttattggtatgattttttagtgtatttaatatgttatggatagatttttgagaatagtaagaagtaattatattttttatgaatatatagtagatgaagtattttgatttattattttattttatttttgaatatgtttatgatttttttaaaaaaaagtaaaaaataagaaaaattttttgaagtatagattagtagatttgagttttaatttttttattaggtgatattaggtaaatttttaaattattttgttttttagttaatgtatttataaaatttgataaaattttttgtttttagtttattagtaatatttagttatgtataatgtattttgaagttttttaatatatggatttaaaattaaatagtttttttattttagatatttgtttatttttatttatgaacgttttttttttattaatgattgttaaaaatatagaatttaaggagatagagaagggtaatgaaaaaatgtttaggaaaaaaaattaaatagtattaatttataagattagttttaaaatttaagagttttttaaatgaattcgagacgtattaattaaagatatttaatttattgatttaagatgtaacgtgtatgtattttgtaataaattttgattatgaattgtaaagtttgttataatttttagtttattataattttattggtattagttaattttgtatttgttttttttttttttattaatggagttaatatttagttagtttattttgtagtatatgttttttagtgatattgattttttttttttttttgttttgtgattttattgaagtgttaaatattataggggaagttatttaatgtagaatttaatattaagaaattagaagtttatattttattgatagaggagaaaattatttaattttgtttttttatataattgattttttaatgatttaatgtaaagtgtttttaaaaatttttttatgttatatgttgtgttgtattttggttatttttaagtgtattagttatattaattgtaggttaattttgattttatttaaattatatttttaagagtattagagatagagaaaataaaaaatttagaaaattttatttagaagtagattataagattaagattaattttaaaatttagagtttatttggaagttaaatatgtatacgtggagtttttgtttaatagtggttaggttttgtgtttgttgttgagtaataggaggatagagttttagtttagtataaaagggtaagaaggtgtattgggagtagtatgtaaagattgtttgtagttttgtatgtaggagatggttttttttttagggtgtgtttttttgtagtagaatatagatatagttagtatatgagtttgtataaattatggaaatatttggatatttgatcgaaattataatatttttttttatttagatgttagagtgtatgtgtattttatgtatagatatagttttaaattaaaataattttatttattaaattggttaagcgtagtggtttatgtttgtaattttagtattttgggaggttgaggtaggtggattgtttgaggttaggagtttaagattagtttggttaataaggtaaaattttgtttatattaaaaatataaaaattagttaggtgtggtggtagttatttgtaattttagttattcgggaggttgaggtaggagaatcgtttgaatttaggagacgaagataatagtgagttgaaattgtattattgtattttagtttgggtgatagagtaagatttttttttaaaaaaaaaaaaaaaaaaaagaaaagaaaagaaaaaaattatttattaaatttatttgtgagtgtgtaattaaataatatattttttttttttttttttgtagattttttttgtggatagatattttttttttattaaaaaaaattaaaataaaatattttttttaaatattttttatgaagtgttaataatagtattgggaggatataatagtttttttagtgataagtaattatttagtttttggggttgttggttggggttatgtttttaagtgttagttgttggtttaagggagaatttaaaagggagatagttaagataaggagtaggaaattaagtagggatgaaatgattgggggtagtttggtatagtggtttatgtttataattttagtattttggaagaatgaaataggaggattttttgagtttaggagttcgagattagattgggtaatataggtagatttataaaatatttttaaaaattagtttggtatagtggtatagttattttggaggttgaagtgggaggatcgtatgagtttagaaggataggttgtagtaagttatgtttatattattgtattttagtttgggtaatagagtaagattttgttttaaaaaaaaaaaaaaaagaaaaagaaaagaaaatggtggggaggagaaagaatgtatttttatagaagggatgggtgaatgttatattttttgatttttatttaaatggtaaaagttttatattgtattttatatatatggtatattttatatgtgtataggatataatatttaaatgtttttatttattgaatttagagtttagtttgagaagagtgataattgtttaattagtttttttttttttatgtttattaacggaataggttatttgattattcgtttggtttttatagttaaatgagttttaaaaatgtataatatttttgttgttggaggttatagtagatatatacgttaattaatatttttaggttatggttaaaatttagtgttgtggttttgtttgtttttgaaagaaatttttaaaatgttagatgagaataaaatttattttttattggagtattataaatttttttagtaaattgaatatataattagtttaatttagttagaatatataaatggattaaaatgtgttttttatatataggaataagttagtgttttaaaattcgttatgataattaaggatttagaatagcgttagttggtattttttttataaagtagaatgaattaaaaagtataataagtatttgtggaatgtatttgtatttttttttaaggtaggggtgatcgggattatttgtagggtaggatttttttgtttttagaaagtatattttttagttgaggaagattagattaatattgtaaaatattagaatattaggtataaaggggtagaataaagataataagtatttagaattttagtttaggaagggataaattagtaagatttgtagaagttgaaaaagttttatggaagaaaaatgttttagtttggttaggttgttataaaaaaaaaataatattatcgattgggtggtttagataatatttgttttttttagttttggatgttgggaagtttaagattaaggtattggtagatttagtgattggtgagggagttttttttttggtttatagatggttatttttttgttgtgtttttatatggtggaaaagtaggaagggagttttttggggttttttttataagggtattaattttatttataagtggtttgtttttttggtttaattattttttaaagttttttatttttttttttaatattattattttgggggttaggatttaaatatgttaatttggggataagggggatataggtatttaatttttaataagaaaagatttggatggtattttgattttggttgtataagaaagagaggagagggtattttaggatagagaaatgatataaggtagttgtaggtagtagatgtgaaaaataaatgtttgttaggtaataaatataggatgggttaggtgtagtgatttaggcgtataattttagtattttgcgagggcgagatggatggattatatgagtttaggggtttaagattagtttgggtaatatggtgaaatttcgtttttataaaaaaaatatagaaaaaaattagttagatatgatggtgtgtatttgtagttttagttatttgggaggttgaggtgagaggattatttgagtttaggaggttgaggttgtagtgagtttggattgtgtgagtgcgttttagtttgggtggtagagcgagaatttgttttaaaaagggagataggatggtttagtaggttggataagaatgggagaatttagagattttgtggggagaattttagaatggagtttttgatggagattatagggagttattgtaggtttttgagtagaggtttgttatgatatttaagagaaagtaattattttagtattttgaaagttagtgttattgaatttgttggttgtttttttttttttttttttttgtttgtttgtgttgtttatatagtttattttttttttatttgttatttattgtttatatttgttttagtatgttattttttttatttattttttttatatttttagtttttaatgatatgtgagggtagaattaagagtgggttggaatatttatttagaatgtggaattattgttgttggaggtttttggagagattaggaaagtcgatttttgatattttaggttttttggtttttagttgtatttagtagtgatgtagtttttttgatatggtacgatgttgtttttatttttttggatgagtaggatttttagaaattatgtagattataatgttttgtaaatgtgtatttggaaagttttggtgtggatatttttttaagtagtagttttttttttttttttttttttttgtatttaagttagggttttattttgttatttaggttggagtgtagtggttagtggtgtaatgatgatttattttagttttgatttttagggtttaagtgatttttttatttagattagtcggaattagaagagtgtattattatttttagttaatttttgttttttttgtatagatagagtttcgttatgttgcgtagtttggtattaaatttttgggtttaagtattttttttcggttttttagagttttgggattataggtgtgagttatggtattgggtttttagtagtagtttttagttatttttatttataggagacgttttatgttttagttattcgttattttttaattttaaattagtttttttttatagttttagatatgtttgaggttgggtttttaagaaatatgttttttttatgtataatttttttttttataattttatattgttagaattgttgtgtttttttttattttttttttttttttttttttttgagatggagttttgttttgttatttagattagaatgtagtggcgtgatttcggtttattgtaatttttgttttttgggtttaagcgatttttttattttagttttttaagtagttgggattataggtgtttgttattatgtttagttagtttttgtatttttagtagagatggggttttattatgttggttaggttggttttgaatttttgattttaggtgatttatttgttttagttttttaaagtgttgggattatatatatgagttattatatttggtttattaattttttttttaaaagaggaatttattgtttattttggtagtatatatattaaaattggaataatatagagaagattagtatggtttttgtgtaaggataatatataaatttttgaagtagtttatatttaaaaataaaaggggtgagggaaatataggggataaaaaagtaagtattttagggatgtttttaaatttatttattaattttgaaaaagtaaaatgtagttaatttgaaggaatttttagaaaaattgggagtttattgttaattaaattacgtttatttaatttagtattagattgtttttttttttaattagatggaaattattagtagtaatagtgaataaatatatttaggtttttagaggttatttttaattattattaataatttggtttttatagattagtaatatacgaaaggtaatagtttagtaaaagatatataaaaggtagcggaagtttttgtgttttttatttatttaatatttagttattttaaaaattttttgtaagtgaggtattcgaattttttaagtttaaaattggtagattttatttagaagatgtagtaaaatatttgtttgaaatagatgttaatgtaaattgttaataaaatttttataaagttgatgaaaagataagttttttattaatattattagtagatttgtttgtgtttaatatagtttttatttattagttgtttgtttagtggttttatattaatgtaaagttattaattatgaagtaggaaagaaatgtattttatatattatattttaatttttaaatttaattatttaattgaaatataatataagataaatagtttataaaatatattaatgagttaaaaggaatttggtttataatttgataagattatggtttttagaattgtttatttaggaataaagattttatttaaattatgttttgagtggttgagaaagttgtagaatgatagtgttattatgttttgtagataaatgtagagatatatgtatgtttttttttttttttgtttagatttaatattgtatgttagtatttttgaaatttttatatttttaattggttaattgagattgtatataatatgtatgtatttttattttaaaatattattttttttggtttatttattaataatttgttattaatttttatgttatttttgttttagataatagtgtttttttaggaattgtattgaggtttatatttaaaatgttttatagatattttttttttattttttttttatatggagaagaaagttaaggtattaaggtttaagagtatatttgagtttatagagaggttatgtttaagatgagaatgagaatgaggttataggaatttgatttggatattagagaagatgtttgttattaaggaatttagggatgttaaggatattattaggtttttttttttaatgatgtatatgttttggaatatttgtgtatatttttatagatgtatttatttatatatatatatatatgtataaatatatataaatatattttttatagttattaagtaaaatgtatttgaattgttattgataatattatgttgaaaatttttttgtttgtttatgatattgttataggttagtattttagggagaaattttgtttttttttttgtagaaatttttattttagtaaagaaattttttcgtatttttataagtgtttagggttattatattttggtttttgttgagggaaataaatagtaaggagatttttgatgaattttggttttcgtttattgtaatttagaatttacgattttttggggttttttttagaaataattgtagattttttattgagtgtttattgtatgtttagcgttgtgttaggtattggttatatttaatttttgtcgttaagtaatatatggtttattgattgaggaaggggagtaaggaaatagtattatgtttgaggtttgtgtagggaattttggggatatagaggagggatggggtgaaagggagggggatttatgaggttttagagtttttttgtttgttttattatatttttttagatagaaatgaaaagtttgattaaattatgtgagtattgaggatagggggttgaattttttaaaaattttgattgtttgaatgattggattttggtttatttagattagatttgtagatttaatttatgattgtggataaagatatttttttaatttgttattttagttagtatgtaagcgaaataggaataacgatttaatttttatgcgtaatatagttttttttggtcgaggaagagtagttaagagatattagtaagtaagttattgtttataaattaatataagttaatttattttgtttttgttttaagttgatttttaatttttttttattttttattttatttatttatttgtttttttgagatagggttatttaggttggagtgtagtagtgtaattatagtttattatagttttaattttttgggtttaagtgatttttttattttagtttttaagttgttggaattataggtgtatattattatatttagttaatttttttatttttgtagggataaggttttgttatgttatttaggttggtttcgaatttttggttttaagtaattttttcgttttagttttttaattatagatgtgagttattatatttagttttaagttgattttttttttttttttgagatggagtttcgtttttgttgtttaggttggagtgtaaaggtgtgattttagtttatcgtaattttcgtttttcgggtttaagtgatttttttgttttagtttttcgagtagttaggattataggtatgtattattacgtttagttaattttgtattttttatagagacggggtttttttatgttggttaggttggttttgaatttttgacgttaagtgatttgttcgtttcggtattttaaagtgttgggattataggcgtgagttatcgcgttcggtttaagttgttttttttaaaaaaaaataaattattaattattagggaatttttttaggtttattatttataatttaaagtttttttatattttttttttagtgttttaaattttgatggttcgagaaggttgggtatttgtttttagttttgagaatttttttatttaaattaagttttttttttttaaggagtagtgggattttaattagatttttattagaaattttgattatttagattttttttttgtttattttagtaatttttttttttgtaaagatggatggcggtagggggttggagagggaataattttaagaatttgtttttcgggagttgttattataggttaggtaggttttgttttttttttttgtatttttttttcgtgttttaggaggattatatgcgaataaatgaggataatatttggttatgaggatttttaattttaggttatattaaataaattgttttgtagatattaaaagaaaatgtaaaggaaaatttatagaattagtttatataaaattaatagtattttttttgtttttttaaaaggtgaatatatataagaaattaatttattttatttattgaaaaaggatgtagaaaatatggggaaaggtaaatgaaagttttaattttgtagaattttttttagttttaaacgattgtggagataataggaggatatttttgttttttattatatttttagtttgataagtaatatatgaataatatatggattattgggtggatataattgagattaatgtatatatattaattaatatatgatattgtaatataatattttaaaataatatattatattgatttatatttatggatttttgtataaaatttattttatgtttatgtaatattttttaaattggtaaaatattttgttttataataataaattgttatatataatagttttttggagagttatttgtaaagattagtaaaatgattttttttttttttattagaagaattttagaaggttttatttgaataaatagatttacggagacgattggaataagaattttaggtgttaaaaggaaatatattttttttagtatttagtaagaaattatttttattttattgtatttatgataattgattacgtttttattattaggtttaagaatgtgattttaagtattaagcgattgtgtaaaatatatatagtttttttatggtttgtttaaatatttataaattttagttttatttaggttttgaattgatttatagataaaattttttttaagaattttttggtatttgtgtatggatatatgtgtatttgtatgtgtatgttgtacgtattttaaaatgtgtgtaaatatataattaaatatgtaaatatatttaaatatttagatatagttcgattatagattttaaaataaaagaattattttgtatttatattttttaaagtagggaaaataagaaaaagttaatttttatttttagattgtttttgatagttttttgatgtttgagatatgtataaatatgaaaatttaaattttaaaggtttagtatatataatttattttattaaatgaaattgttataattttagtagttttagattttttatttatatttaatgttaaaattttattttgaatttagaggtaggagatattgtagtttaaaaattgttagttttatttttagagttttggaattttttaaaattttatggtaggtgtttagatttttaaaatttatttgttttggtttgggttatatttggataaatatattttagtagtgttttttaagtttttcggattttgatttagttatattatttttttagagaaaggaaagtgggaaaatagtatgtaaatttattttttttttttttttgagatggagttttgttttgttatttaggttggagtgtagtggtataattttagtttattgtaatttttgttatttgggtttaagtaatttttttgttttagttttcggagtagttggtattataggtatatattattatatttggttaatttttgtatttttagtagaggtagagttttattatattggttaggtaggtttcgaatttttgattttaggtgattcgtttatttcggttttttaaagtgttgggattataggtatgagttattgtgtttggtttgtaaatttatttttttaattatatatatttaaaattaattttttttagggtatttttttagaatgttagtatgttttttgttattaatttagaaattataaaatttaagttggtaatttttgtgttagatgatttttgtattagtatttggaagatttttaaataattatgataattttaataatgttagtttgaaggtttttatttattagggttttttaaatgtaattattggtataattgaatgatatatttaggtagtatttttgaatagtattaggtttttggtaatatgttaaattaaatttgattagaatatttagtgaggatttaaaatgtagaggtaattgtatgatggaagagaattttgattataaggaatgggagggtttgtaaagtgtgttttttttgtatattttaaaggaggttggagtttatggtattttagttattttgaatttagagaatgtttgtagggttttagaatgagattgaaagaaggagaatggttaatagtttttgatagtataattaggaatattgtgatatttatagttttgagaaaaggagaaatatttaaaatatttttgaaattataagaaataggtgttttgaaaggatttaggattttttaatttttgaaattgtattttaagaaagattgtatagttttttgtttttaatgagaggtattgaatacgtttttttaatagttgatgtttatttaattgttgagtttgtaagtttttgtttttagatttagtagagtgggtttaagttttattgaatttttaatatgtttttttaattttttatgaaatttttgtagttataatttattttattaataaaagttaatttatatttattttaaggaattaagtaatttataataatttatattttttatagtaattgttttgtagtatatgttttcgttaaataaaatgttagaatgttatagtattggttagttttaatttagattttttatttattattttgatgtgtattaatatgtattttttgtgattgttatatgtatgaaatattttaattaaatagtaataaaaaaaattttttttttttttatttgtaatatattttattgattaaggaagtggtatgtgtgtgtttaagtttaaataatgcgtggtttagatatattataaagaggtagttaattttatacggatgaaaatagtaaatgtatattatgtgtttgttaattaaatgtgaggggtcgtgaggttaggggatagatttagatttatttagatgaaaaggggaaaattaagatttgtaaagttttatcggaaagaagtatagaggaattttcgtgagagttttgtaaagttttttattaggaggtgaatagatgtttatagttattatatttaaaatttagtttatttagagtattgtggatttaggttaggagttgtagtatgtgagaattaagaatttaggtttaaaaatcgattagatttgagtttatttttaggttttgttatttgttggttgtatgattttggaaattgtaaaatggggtaaataatttttgtcgtttagaagaatgagaggattgaatgagagatttatgtgaagtgttgtgtatatgttgggtataggataagtataattatgatggtgattatgaagtagaaagaagaaaaggagaggaatagtattgagttttagaaaagtatttttaaatttgggtttaaatttttggtttttggttaggtatagtggtttacgtttgtaattttagtattttgggaggttgagttaggtagattatttgaggttaggagtttgagattagtttggttaatatggtgaaatttcgtttgtattagaaatataaaaaattagttggtgtggtggtatgaattttagttatttaggaggttgaagtaggagaattatttgaattcgggaggtagaggttgtagtgagtcgagattacgttattgttttttagtttggataatatagggagatttcgtttttaaaaaaaaaaaaaaaaaaaaaaaaaaaattggttttttgtcgtggttttaagggttaatgaggattataggaatggtcgtaagaatggagagggtataaataaagataatagagaggaggggtaggtggaggaggaggaggaggaagggtagagggaaaaaggagaaggaggaggaagaggtaggaaaggaggaagaaggaggaagatggaggagaagaaataagtttttatatttggggagtagtagttgggaggaggaagagaaataagtaagtttttgcgtttgttggaatagaggtttttagagttgttttttattgatatttatgtatagttttgatggggaaatttggggaggagaaagtaaggtaaggtaggtatttgttattatagtagaggtagagaagtatggtaggttatagagagggttttaggtgtggatgttgattgttttatttattggttgagtaattttaggaaaattttttgatttttttttaatattataataatattattatttattttttggggttgtggagaggattaaatgagtgaaaggtatgaagtgtttagtatagtgataaatgaatagtaattattattaaatgtgagttgttgttattatatattgttttaaagtttgatgttgatatttttgtagtgattgtatagtaaattagttaatgtaagaaattagaatttgtaaaggtttattgagttgttattatagagggaggaatagggagtgaaatttgttttaatattaaataataagtttaattaacgaatcgggtaggatataatagagaggtagggaggatatattaaggaaaaaggagaagttggaattgagtgggagtaggtgtttggggaaatggattaggaggggttttattattattaaggttattttgagatgataataggatggttggttaaatatgttttgtaatgaaaattatgtttagttggataggttaaattattaaaggtaatttttaattttattattttaaatttttttatttatattggtttgattatttttgtagttgtaaatttagaagttatgtttgttattgtattatgtatattttttttagtaattgtattttttttttttttttttttttttagtattttatgtttttttttattatagtatttatcgttttgttgtagtttttatttatttttatttttttttattagttattttaaaattttagagtttagttttaaatttgggatttgttaaaggtggtaatgaatggagaaggtcgttattagtagggtggtttgtatttttattttttttttttattttagttttttttgtttgttgtttttagttttgtttttttaaaattttagatttggtataaaatttttattttaagaagttagaacgatttgtattgtgtattatggtatatttaagttaattgatttttaaaatttgttataattgtgtgttttttttttaatttttttatttttatttttgtttttttttcggtttagttttagttatttggtagattatttttatttttttttttttatttttgtatatcgtgtttttttagtttagagcgtttttttttatttaagtttttttttttatttggagtatagttaaagttttgttatatttaagaagtttttttatttttgtagtaggtacgattttttgaagttttgttgtgtttatttttagtattatgagttttttgtgttgattttttttttgttttattcgtgttattttttatttttttaatttatattgtaaatagatttagggaagagttatttagaatgtttttttgttgttatttgtagtatttggtatattgtgggtatgtagtatatttttaataaatgattgataggaatattggggttatatttaaagagattaaaattgataatggaggatggaattggattattgaagatttgtataaaggtgagtatttagggtttatgagttgaatttttagatttgtagatttagtgataaatttatggtatttataagaattgagtggaaaggttagttggttattataggaaagtattaatgaatggggttttatgaaaaatgttagattttatttaaaatgttattattttagatttttataaaaaattgtttttttaaattattgttaagagtttttgttattaaaaataaattatattttatttttttgaatatggttgtttgtattttttatttgtggttattattgaatttattttatgtttagtggttttttttttttttttttttttttttttttttgtagtatattttgggagatgaagtgtagggtcggggtggtagggtagattttaaaatattgtatagattaaattttttttagtagaagatggttatgaaaaaaatttttttttaagttttggttgggtatagtggtttaggtttgtaattttagtattttgggaagtcgaggtaggaggattgtttgagtttagaagtttgagattagtttgggtaatatattgggattttgtttttatataaatatatatatataaattagttaagtgtggtggtatgtataggtagttttagttattaaggaggtagagatgggaggattatttgaatttaggaggttaaggttgtagtgagttttggttatattagtgtatttaagtttgggtgatagagtaagattttgttttaaaaaaaaaaaagtttaatggttttttaaaaatagagataataaaatgaagatatttgtaaataaattgaattttaaagtttattgtttgtttagaatattttaggtgaattagatgtgaattagatgtattttatgggtttgtttttttatttatggttttaggaatgtaggttagatattttttattgttgtttggaaaattttttggtttttttagttgtttgagtttgtagtgtgtagttttgttgttgtgttggttgatatgttgtattttagtgtttttttttgttattttttttcgtattattattttttaaaaatagttgggttataagtgatttttattatagaagttggtttaatgattttttttatttttaattaaattttgtttttattaatttttagaatatagaaaaaatatggtcgggcgtggtggtttattttgtagttttagtattttgggaggttaaggtaggtggattatttgaggttaggagtttgagagtattttggttaatatggtgaaattttatttttattaaaaatataaaaaaagtagttaggtatggtggtgtatgtttgtaattttagttattcgggaggttgaggtaggagaatcgtttgaatttaggaggtagaggttgtagtaagttgagattatgttacggtattttagtttgggcgatagagtgagattttgttttaaatttaaaaaaaaaaaaaagaatatagaaaaaattttagatttttgtatgtttgttaattaataatttttatattttaaaagttatatatatttttgttgtggaaaattttaagtatgtagaaataaaaaggaaaggaaataaaaattatttataattttgttatttagagataattaatgttaatattttggagttttagtttttttaaatgtttgttaaatgtttttataaaataaaatgaaatgtaatatataatattttttattttttttttgttttagttaaaatgtgtttcgttttgttattatatagtagtgtataaatatattgttatgttggatattaaggtttgtttaagttttagataatggatatttttgtaattaagtttttgtatgtatttattattatttttttaggttaaatttttaaaagtgttgttgtgttaaagggtatgaattttttaaaagttttaatatataattttaagttgttttttagaaagttttaattaatttttgtttttatttttggaatagtatgtattatttttttatttaatttttgttaatttaagaggaaattttggtattttatattattttttttttttttattgttggtgatgttgaatattttttatgtgtttagtatttttttatatgttttgtgaatgtttatttatattttttttttatatttttgttgatgtgtttatttttttattgatttgtataaatttttttatattaaaatgttaattttttgatatgttgtaagtattttttggtttgtattaattatttttaaatgttgattatggtgttttatgtttggggagtttaatttgtttgtaatttattggtatattaaagttttaaatttttgtttgattaaattaattagtttttttttttttagtttttgttttttatgtttttttttattttaattttaaaaaaaaatttgttattatttcgaatattttaatggttttttttttgttttttattttaatttaaggaattatattaagtgtattattatagaaaaatgagtatgagttaagttaggattagtttttattattttattttgaattgtttttagttgtttttttttttaaaattagaattttttgtgattttagggaagtgttttagtttggtcggttttaggtagttttttttttttaatttattttagtttattattttggttaaaggtattttggatttttagaggtttagaggaaagtttttttttttataaagggagttatgtttgttatgtgttttagtgtttggaattatattgatttttttggaggtttgcgggttatagcgtaggattaagtgttggaattagggtagtttgtggagggttggtttttttgttgttttgtatttttagatttatttttagagtattttgatttggtgaggtggatgttagttttttatatggtatttttcgtttaattgttattggtgtaaattaaaattttttttttattttttttgtataggaaagataagtgggtgtatgaagtttaattaaattaatttattttgttattaaaaatttttttttttttttttttttgaggtagagttttattttgttatttagattggagtgtagtggtgtaattttagtttattgtagtttcgattttttaggtgatttttttattttagttttttgtgtagttgggattatagttgtgtatttttatgtttagataattttttgtatttttagtagagatagagtttttttatgttttttaggttggttttaaatttttgggtttaagtaatttttttgttttagttttttaaagggttgggattattggtttgagttattatattcggtttgttattaaagtttaaaatgttagagtaagaaaatatttgaaagagtatattattttatatttttgtttttttagataaaggtttgaggttttagagtggggtagttattatagatggtagaattttaatttgttggtggataattttgtgtgtttttatttttcgtttattagttagtttttgtcgtgtgttaggtattgtggtaggttttaaaaatttttaaagtgtttaaacgtatttttttgttttttaagaatttaattgtttagtagggagatagatggataataattaattatagtatgtattatggatgtattaatataggtatggatagggtgttggagaagtataaaaaaaaatgggtaaataattttggtaggaggggttgtagaattggagaagattttttggaggaggtagtatttggattggattttaaagaaaaggtagttgtttgttgtaagggtaagattatagtaggggtaaaggtatagaggttggaagtataatgtatagttgaggattggagagtggtttggtggttggtgtggtgtaggggatttttttcgtgttttcggttgtagttagttgagttatatgtagttttttttttttttttttatgtttttatgtagaatgttgttttttacgtgtttgtttaagtagtttttttttttaatgtttttagaatgaatgatagttttttttttaatttttgtatggtattatatatttttttttattatagtgattttgatattaaaattagaggtgatagtagggattgggtttttttaaaaaaattaattagaatatatgtttggggttggataagaaatttaaatagtatgaaaaggtagaagttgaaaaaaataaaaagaataaagtttttttatttttaagtatttagagttttatgagtggtaaaggatttattattttgaaagtgttggaaagttattggagatttttaagtagggaattaaaggtatttggagagaaagggattggtggtaggtggttagtcggaaaatgatttagggatgaggtgtttgtacgtgggaggtaataatggtaaagaggggagaatatgatggtggaatatatagaatttatatattagttggttgtgaagatgaaaggaaaaggagaagaaaagataatgatgaagtttttggtttttttaagttgttgttttattaattataaatttaataagaaatcgtgtttattttttttttagtgtagaaaaaggtaaagttagttacgtttatatttttaaaaggattacgtggagaagatgtaatattaaattgtatatttggaagttattttttttttaatgtaataaatatggttaatatgtagaatagtaaaaatattttgtatgataatattttttaaagtttttttttttttagattaaggtaaggtttgtagaaaggtattaggataaagtaggaatataaaataaggttgattttagggtgagagagtttgttgtataggggagttaggtcgaagtatttttttttaggagtgagatgagttgtagtgaagttaggtaggtattttttatagatttatattttatttattcggaaggtattatgtgtaggaggggtagtattttttatgtttagttttatttgaggtttgttttattgatttttgttggatttttgaagatagtggaagtttttaatatttgtgatttgtataagtgtgtaaaggttaaagaatatgattgtgtgggatatttttgtgtaattatatgtaagagattatattagatggaatatgagatattgtaaaatataagatatatttagaatttattgtttagtttgattaaattatagagtgttgaaaatattttttaaataagtatataatttgtttatgaaaaaaatatttaaaagtaggggggttgtttatgggattgttaataatgtttttattagttaaattaaaagtagattttatattttagttaatttttttttattttttttttttattagataatttttaggattagatgaaaagggagttagtttatcgagaagaaatggtgtaatagttataaattgtaagttgtatttttatttaa

SEQ ID NO: 103 - DNA, 20043 bp, Artificial Sequence
  chemically treated genomic DNA (Homo sapiens)
aggcgtgagttattatatatagttaattgtagggatttttataatttataaaaggaaatagagagaattcgaattttttgtttttatattgtttttatatttttgagggttatttattttttttgttttgttttgttttgagatagggtttggttttgttatttaggttgaaaagtagtggggcgattttagtttatagtaattttcgttttttgtgtttaaattattttgttatttcgattttttgagtggttggaattataggtatgtgttattatttttagttgatttttgtatttttttggtagagataggattttattatgttgtttaggttggtttcgaatttttggatttgagtgatttatttatttttgttttttaaagtgttgggattataggcgtgagttattgtgtttggtagggttagtagtttttatgaaattttatgtgggagtagaatgttttttgatttgagaagatttttttatagatgttgtatgagtagttattattttttttgtgtgaacgtcggatatggttgttatgggtagtatgggatgtaaaagatttattatagtatttgtatttgaagggttttttttcggagtgttgtttgatgtgtgtgcggagtatgttggaggttgtgaatttttgtagagaatagaaatatagaatataagaaaaagttaatttttacgagttggataattaattaaattaaggggtaaattttattgttgtttatttttatggacgaattttgggttttaaggttatagagtatttttggttattattagtagttttaattcgaaaggattttattgatgtgtttttttggttagttttgagaagtattggatgttagaatagtggttttttaatggttagattatttggaggtttagtttgtaaaaaagtagattgtaggttgggcgtagtggtttatatttgtaattttagtattttgggaggttaaggtaggtggattatttgaggttaggagttcgagattagtttggttaatatggtgaaattttatttttattaaaaatataaaaattagttaggtatgttatcgtgtatttttaattttagttttttaggaggttgagatgggagaattttttgaatttaggaggcggaggttgtagtaagtcgttattgtattattgtattttagtttgggtgatagagtgagattttgtttttaaaaaaaaaaaaaaaaaaaaaaaaaaagtagattgttagtttgggtaatatagtaatattttatttttataaaaagtaaaaaaattatttaggtatggtagtatgtatttgtggttttagttatttggaaagttgaggtgggaggataatttgagttagaaggttaaggttgtagtgagttatgatggtattattgtattttagtttgggtaatagagtaagattttttttttaaaaaaaaaaaaaaaaaaaaaagtagattattaattttatttaagagagtgtgatttaataaatttgatatgagatttaggagtttgtatttaaataagtaattttgatgtatgtgggttttaggattatattttaagataaattttattatagaaagagaagttaatatcgattagaagttaatatcggttagtgtttttgtataagttagtgttttattggtttttttttttttttttttttttttaatttaaattttttgagatggtttgtaggtttgttttatttgtttgtttgtttgtttgttttgagatagaattttattttattatttaggttggagtgtagtggtataattttggtttattgtaatttttattttttaggtttaagcgattttagtgttttagttttttaagtagttggaattataggtgtattatgatgtttagttaatttttttatttttagtagagatggtgtttttttatgtcggttaggttggttttaaatttttgattttaggttgatttatttattttggttttttaaagtgttgggattataggtgtgagttattacgtttagtttagtggtgtttttttatgtttattatttttattttattgatatatattttggaggtattagttgttttaatttggtagatttaatgttttattttttttgagaggtttagaagtagttgtaggatagtttttattttttttacggttttattgtaaaaagcgtaaatgatttagtgattgaaaatataatttatattagtgttttttaataggatttgttgtaataatgggaatatttattatttacgttgtttattttggaaattaatggttatatggagttattgagtatttaaaatgtggttaatgtaatttagggaacggaattttttaattttatttcgtttttattaattgaaatagttatatatgattaatcgcgaattgtatattgggtagtatagagttattttggtgtaatatgtttaaagcgtggttaatttattgtttttattatagtaatttttaattatatgatttatttttgtttttataattttgtattttgtgtaatatagattagatgtcgtttttgtaatgtttttatagaaaattatattagtagtattttttatagattaaagtagtaataatagtagttaatattttagtagtatttttatgttatgttaggtattgttataagagttttatatattttattgatgttatttaataatttggtaaagattattttttttagtttattaatgtggaaattaataggagtttatggatttgtttagggtggtatagttaggtaagtattagaggtaggatttgaaatttggttatgtttgtgtttttaaatattatgaaatagtgatttttttttttttttttttttggagacggagttttattttgttatttaggttggagtgtagtggtataattttgatttattgtaatttttgtttttgggtttaagtgatttttttgttttagttttttaagtagttgggattataggaacgtgttattatgtttagttaatttttgtatttttagtagagatggggttttattatgttggttaggatggtttcgaattttttatttttaggtatttgtttattttagttttttaaagtgttgggattacgggtttgagttattacgtttttttattttttttttttttttttgagatagtgttttattttgttatttaggttggagtgtgtagtggtgtaattttggtttattgtaatttttattttttggatttaagtaattttttagttttagttttttaagtagttgggattataggtataagttatcgatgtatggaaaatttgattataggtgtgagttattatatttagttagtgtttttaaatattatgtaataggttattaggtttttataaatttggaatgtattttattatatgtattttaaatgttagtttggtaataggaggttggttatatttgattatttttagtaaatttgagtatatttaggggtggaaatgaggattgggttgatatttgattaatatttattaagaatttattaagttaggttttgttttaagtttttatttatagatatttaagtagagtttaggatatattttttagtaagaggttttatttattttagtataatatatatattggtatggtttgtttttagagtggattcgtatgtgtttgtttaggttggaagattgagagaaatattttttatatgtagaatattaaggtgaaaaagaaaaatatagttgaaattatatttttttttaataagtttattttaattttgcgtttatttggggttagagaagaatttttttttaattttttttttttttttttttttgagacgggattttaatttgttatttagattggattgtagtggtataattacggtttattgtagtttggaatttttaggtttaagcgatttttttattttagttttttgagtaattgggattataggtgcgtgttattaagttagttaatttaaaaaatttttttttgtagagatgaggttttattatgttgtttagttttgttttgaattttaatagatttttttgttttggttttttaaagtgttaggattatagttttgagttacggtattcgatttgagagaatttttgttttagatgtggaatgtgggaattgaataggtttgtggtatatggtagaggtttgaattagttttgtttttttaataggtagttgtgtgattatagaatattggttaaatttggaattttagtttttcgattttgtttatgggtaaaatatttgttttgttttttttatagagttatgagtaaattataagtattgtgtaattaatttaataattatttacgatttatagagtatttattgtgtgttttatattgttagaaattaggagttagaaattaaggaggggtgacgatgaatatgtaagttaatatggtaatgtatagtagtagattatttgagacgtgttgaatttgtatgaagaggttaatattttgtttatacgttgtgaataattaatattgttttttgattttggtaatttttttcgaaattgttttaggaattttatattaggtgaagtaaattattagagaggtgtaagtatcgagagtttgttagggataaagtagaaggtttttggttttgatattatttttaaggaaattatattaattaaagagaaaaaataatttttttttgagaaaggtttttgtgtttttataatttttttttaggtatgtttatggggtagaggagagagtaaatttttgtatttgtttatttatttatttttatttatttttgaggtagagtttcgttttgttgtttaggttggagtgtagtagtatgatttcggtttatcgtaatttttgttttttgggtttaagtaattttggtgttttagtttttcgagtggttgggattataggtgcgtattatatgtttatttttataaaaaatataaaaaattagttgagtatggtggtatgtatttatagttttagtttagttatttgggaggttgaggttgggtgattgtttgagcgtaggaggtggaggttgtagtgagttgagattatgttattgtattttagtttgggtaatagagtgagattgttttaaaaaaaaaaaaaaaaaaaaagattgtttttttattgtattgtaagagtatttcgtttgttgaagggtaagttattattttattattattagtttttttattagttttgttatttattgattttttggttgatagttttttagttttttttttttttttttttttttgagacggagtttcgttttgttatttaggttggagtgcggtggcgcgatttcggtttattgtaagtttcgttttttaggtttacgttatttttttgttttagtttttcgagtaggtgggattataggtgtttattattacgtttggttaattttttgtatttttagtagagatggggttttattatgttagttacgatggttttgattttttgatttcgtgatttatttgtttcggttttttaaagtattgggattaggcgtgagttattattttcggtttttaattttaaagagagtaagtattttatatattttttgtaatttggtttttgtttgataagataatattttttttttttttttgggatggagttttatttttgttatttaggttgtagtgtaatgatatagtttcggtttattgtaattttcgtttttggggttgaagtaatttttttgttttaatttttagagtaattggggttataggtgtttgttattatattcggttaatgtttttatatttttagtagagatggggtttcgttatgttggttaggttggtttcgaatttttggttttaggtgatttgtttattttagttttttaaggtgttgagattataggcgtgagttattgcgtttggttagtaagttataatttatataattaattttgtgttgatgaatatgtagttttaaattttttattattagaatattggatagtttttatttttgttagtttaataagcgagaaatatttttatcgttttgatatttttaaatttttttagaattatataaatgtatgataattgtaaatgtatttaaattttataggagtatataatatagtgattaaatatgatttttttagaagtttaggaaggaagggagaaattaggataattttatgatgattttatttttagtttttaaaataggaaaatgggtttaaggtcgtagttgtttgaggtagtttcgataaggttaatagttaagtaagaatatatttgtgtttaagtttcgttttttttttaattaagtttaagggaatattgtatttttttgtagtaagtttagtagagtatttaggtatttggaatggtttcgtaatgttattattgattttttgttttataaaattttcggtttattgtagaggtttttcgttttttggaaggatcgtgtttttattttttttttatttatatttgttaatatatttgtatagatttggaataaggcgtagttttttaggagtatatgttaggtttttttttgtttggaatagttcgatttttttttgtttaattaattttgttattagtataaattagatattttatttgtttttttatatttggtttaaggttatttttgtgtattttttataatttacgtgtttaggtggtcgtggatatttttttttttatgtttttttttttgtgggtatttgtattttaatatatgtgtatcgttgtgtttatttacgtttgtttgtttcgtaatattattttttttttttttagagagggtgttcgttaggtattatagttttgtagttagtatttataaggtaatttttcgtgtttaggagtttgggaagggagagagaacgtgatggtgggttatgtgtttttttaatatttattttgtgaggtcggtgttttttatgaatatgaagaatgtggattcgaagtcggtttcgttttttaaaggatcgtttgtagagagaatagggaaattttttatcgtttttgtttatatagggggtgtatttgaggtgtttatttttgtaatatttgtaggtaaatatttttttatattttttatatttgtagttttttgtagattttgttaaatatagtaaatataatgtttttttagttatttttttttttagtttttttaagaggatatttatttatttatttatttttagttaagaattttttggttattttaagaggaattttttttttttgagatagaattttgttgtattgtttagtttgtagtgtagtggtacgattttggtttattgtaatttttgttttttaggtttaagcgatttttttgttttagttttttaagtagttgggattataggtgtttattattacgtttggttaatttttgtatttttagtagaaatagggttttattatgttggttaggttggtttagaatttttgattttaggtgattagttttttttggttttttaaagtgttaggattatatgcgtgagttattgtgtttggttaagagaattttttttttttttttttttttttttttgagatggagttttgttttgttatttaggttggagtgtaggggtgtgatttcggtttattgtaatttttatttttcgggtttaagtgatttttttgttttagttttttaagtagttgggattataggtatatattattacgtttagttaatttttgtatttttagtagaggtggggttttattattttggttaggatagttttgattttttgattttgtgatttatttgtttcggttttttaaagtgttgggattataggtatgagttattatgttcggtcgttaagagaatttttaaaaatttttttattatagaaaaatgtaaatatattaaagtgaaaataatagtgtaataaatttttatgtgttaaatattaagttttgattaattcgtaattaattttgtttttatttatattatcgttcgttatagtagattattttaatattaatttattttttgatttaaaaatatttaatcgtaatttttagaagatgatatatttttaaaaagtataattgtgattaggtaaagtggtttacgtttataattttagtattttgggaagttgaggtaggtggattatttgaggttaggggtttaaaattagtttggttaatatggtgaaatttcgtttgtattaaaaatataaaattagttaggcgtggtggtgtttgtttgtaattttagttatttgggaggttgaggtaggagaattatttgaatttgggaggcgtaggttgtagtgagttaagattgtattattgtattttagtttgggtaataatagtaaaattttattttaaaaaaaaaaaaaaaagtataattgtgttaggtgtagtggtttacgtttataattttaatattttgggaagttgaagtggatagatcgtttgagtttaggagtttgagattagtttgggtaatatagtaagattttatttttataaaaaaataataaaaattatttgggtatgatagtatacgtttttagttttagaggtcgagatgggaggattatttgagtttggggaagttagttgaggttgtaatgagtagtgattgagttattgtattttagtttgggtaatagagtaatattttgtttcgaaaaaaaaaaaaaaatataattataatgttattgttatattgttatatttaaacgattaatttttatttttttatagaaatatatatgtatttatatatgtatatttatatatatatatatatatttgtttaattattttttggttagtttatttaaattaggttttaaataaagtttatatgttgtatatggttgttatgttttttaaatattttaatttataggtttttttttttttttgttttttgatatgtattgttgaagagattattttattagttttatttaagggtagtgtaattttgtagtttttgaatatatttttgtttggtatttgttataaggttaatatattgaggtattgaggtcgatttatttttttttgtgtttttaagattagtttgagttataagtttagagtagttattaggatattcgtagtttatagtgttgttttattttatataatttaagggatttttttagtttatattttattatttaaaatttgtggtagattttagagttagaatttttatgtatagagtaaggttgaaagtattttgatttttttaatgtatagggttatcgtgatgattaatttaattttaatatttatcgagttttattaatgtgagtgatattattattgaatggtagataagattgagaggtaaatttgtttttattaatggaggagggaggaggagagaagttagagagggtgtagttagattttagtaaagtaggttttacgtttaggggtgtttatgtgttgggggaaggcgagagaataggggttatttataaaagtatttttgtagaggatattttggattttagaggataaagtggttttgattatgaatgtattatagagattttattgtttgattttagggaggaagagtagttaagagtgagtttatgtaagagtttgtagatagaaatttttttagtattaggatagtagggaagttgtttattaggggttttgttagttgataattatattttaggtacgtttaataggtggttaaggaaataaattatttattaagtaaataattaggaaggtaattgttagttttaagttgatttatcgttttgttttgtttattatttttattgaggtgttaatatttttagaattttcgtgttgggatatttttttggtatagaggtagaatttttattggttagaaatatttggtttttttgttttttggggtgggaagggaagagagggttagtaattttataaatttaagtattaaagtatattaaaatttagaataaagttttaatattgagttcgtttaagaataattatttaggtagaaatgaaatttaattttattttgttttttattttttttaattttattttgttttttattttttttttttttagttttttatatttttatattttaaaatatatatttaaatttttttttttttttataagaggggaatgtttgtatatttaaataattcgtttatatagagtttagattttttttttattatttaagattttaaagaggaaggtttttatttattattaatttttattaaaaagtttttggggaaaaaaatttatttgagaatgtaatggaattttaattttttttttttttttattatatttaaattatttatattaatagattaataaattaatatttatttataattatttttaataaattaagttgtttataagtttttttttattgtttaaaatatatgtttttataataatgttgtaagtattaggtattatttggtttagaattggaatataagtattttatttgtatgttgggtattttttgtatttaattattataagtttttattttgttgtttgttttgattgtttttgatatcggtatattattttatgttaataataaataggttgagtattttttttttgaaatgtttgggattagaagtgttttggattttaggtttttttcgaattttggaatattttatatatataatgaggtattttggggatggaattaaagtttaaatataaagtttatttatgttttgttttatatatattttatatatatagtttgaaggtaatttttttttttttgagacggaattttgttcggtttgtaattttcgttttcggttttaagcgattattcggttttagttttttgagtagttgagattataggtatttgttattatgtttagttaatttgtttgtatttttagtagagacggggttttattatgtttgttatgttgtttttaaatttttgattttaggtgatttgtttgtttcggttttttaaagcgttgggattataggtatgagttatcgtgtttggtttatttgaaggtaattttatataatattttaaataattttgtgtatgaaataaagtttgtgttaagtattggtgtgtggaaatttttatttttggtaatatgttagtgtttagttttagattttagagtattttggatttgggattttttgattggagttgttgagtttgtattattatttatttaattattatattattgaatatttaggttgtttgtgattttttatttataagagtggtgttatagttaaaaatttttataagtatagttttttttttttggattatttttcgataatagatttttagaagagtattattgagatattaaagttataaatattgtaataatttgatatatacggtgaaaaaattttttaaaaatggtcggttatggtgttttatgtttgttattttagaatttagggaggttaaggtgggtggattatttgagtttaggagtttaagattagtttggttaaaatggcgaaattttatttttattaaaaatataaaaattagttgggtgtggtggtgtatgtttgtaattttagttattcgggaggttgaggtaggagaaatgtttgaattttggaggtagaggttgtagtgagtttagattatattattgtattttagtttgggtgatagagtgagattttattttaaaaaataataatgattttttaaaaggataataattattttgttagttattaagtagatattttttttaaatttattgtttattttttttttttttatttttttttttgagatggagttttattttgttatttaggttggagtgtagtggcgttattttagtttattgtaatttttgtttttgggtttaagcgatttttttgttttagttttttgagtagttgggattataggtatgtattattatatttagttaattttttgtattttagtagagacggagttttattatgttggttaggttggtcgtgaatttttgattttaggtgatttaattattttggttttttaaagtgttggggttataggtgtgagttattacgtttagtttgttgatttttatttcgaaaggagttggtatattttaggaagtgattaataggttttggtttggtgttaagtaggagataatttagagttttatagattatagagaattttaattatttttgtttttatttttatttttatttatatttttatatttatattatttattaaaatatttttggttttaggtattttagaaaaaggatatttaatttgtatgtagatattagaggcgattagaataagtaatagaatgagggtttatgatggtttagtggcggggggaatttagtatggatataagatatttgggggagtaggaagatagtttattaaaataattttgatagttttttattattgggattattatttattattagataaataatgacggttgattgtttattatttattattagataaataatgattgtttattatttattttttaatttttggatatttttttgttttttgttttattgttttttgagtttgattgtttttttttttttttttttatacgtgttttattttattttatttttaagtagttttttttagtttagttttaatgttttttttttagttagtacgtattgggatttagaagtacgagatattaaagtgtttagggttattttttgttttgaagtattttagtttagtaggaaaataggtatgtagatgtaatttattttttttttttttttttttgaaacggaatttcgttttgtcgtttaggttggtgtgtagtggcgtaattttagtttattgtaagttttttttgttgggtttacgttatttttttgttttagttttttaagtagttgggattataggggttcgttattacgttcggttaatttttttgtatttttagtagagaagaggttttatcgtgttagttaggatggttatgattttttgatttcgtgattcgttcgttttattttttaaagtgttgggattataggcgtgggttattacgtttgggttattttttttttaaatttgttttttatatatttattatattataataatttgttttttttttttttttttttttttttttggagacggagttttattttgttgtttaggttggagtgtagtggtgcggttttggtatattgtaatttttgttttttgggtttaaatgatttttttgttttagttttttgagtagttggaattataggtgtgtgttattacgtttcgttaattttttgtatttttagtagagacgggtttttattacgttagttaggatggttttgattttttgatttggtgatttgtttatttcggtattttaaagtgttgggattagaggcgtgagttattgtgttcgatttgagatgaggttttattatgttggttaggttagttttgaagttttgattttaagtgattcgtttattttcgtttttaaaagtgttgagattataggtgtgagttatagtattcggtttgtttttttttttatttataggaatttatatttattttgttttatttattagattagtagtttttaaattttagtgtatatagaaattatttggagagtttatttaatatgtaaattttaaagttttatttttagagtgggttggtggttttttcgttttttgttattggaatgtggattagggattaggattagtagtattttttgtaagttgataaaaatattaaattttgggtttttattttgaatgagaattagtattatgaagatttttgggtatttatttttatattaaagtttgagagtgagagtttagtttagtattttttaaatttgtttgagatttatagtaggtaatgtattttatgtttgatatttattatatttatatatatttatgtgaaatagaaattttataaaataatttttatttttaagggatttttattaatattttttattttattttatatttttttttttttttaatgtgggttttgattattaaattgattttttattttattaagatatgtaattttgtaatttattatttgaaaaatattgttttagtgattagattttagttatattagtttgggtagagatgaattagaaattggtttatttatggtagaagttatatttatttagtacgtttttttttatttttggggtggaaggtagggaagaagaataagtttttataaataggagtatatatttttataaataggagtagttttcgtagttttgggaaattgaggatgtttttttttatttgggtaatttttttttggttagagatattttcggttagttttttgtattagtttttaggagggaggagttgtgtatggagggtttgtggaaaagagtttagtttttttattgggatgtttttattgggtaaggcgagggtgtgtatttatttttagagggtttagatggttgttttttcggttttgtgatttgaaggtttataggaatatttagaaattttttatagtagtttttatattatataaggagtttttggttttgatggatttttttgtagtttttataaaatatatgtttttgatattgtatagtaattaggttttgttttttggggaagcgggtatagttgatataggatatttagtttttcgtatttttttttttatttataaagtggtttaaatgattatttttaaagatttaaatgaaataagatatgaagtttgtattgtattttttttttggtttaatttataaaataaattttttaatatttgtaatttaaatattatatttgagtttattaaatatatttttattattttgatttttatgttattataagtagtttataaatttatttatgttaatatagatttgttagtttaaggatatttttttaggtaatgttatatattgggtttgtttgttttttttagagatagagttttattttgttgtttagattggagtgtagtggtttaattataggttatagtagtttcgaatttttgggtttaaatgatttttttattttagttttttgagtagttggaattaaaggtatgtattattacgtttggtaaatttttttaaaaaaattttttgtagagatagggttttatttttttttaggttggttttaaatttttgggtttaagtgatttttttattttggttttttaaagtgttagaattataggtgtaagttattgagtttgtttaatgtgatatattttaaaagatttttatttttattatttttttgttttttaaatttttatagtgagtatatgttaattttataagtagaggtaagtgaaataaaaaggttttatttaattttattatttaaatataattgaatagttttatattttatttttagttaggttttatgtatattaatggagttatagattattttttttaaggtcgggtttggtggtttatatttgtaattttcgtattttgggaggttaaagtaggcggattatgaggttaggagttcgagattagtttggttaatatggtgaaatttttttttattaaaaatataaaaattagtcgggtatggtggtatatgtttgtaattttagttattcggaagattgaggtaagagaattgtttgaatttaggaggtggaggttatagtgagttgagattacgttattgtattttaatttgggtaatagataaaaatttcgttttaagaaaaaaaaaataaaaaaaaaaaaataaagaaagattatttttttttttgttgttggtaatttcgttgtttttaatattttgttattataaataattttaggattaatatattttatatagttttaattttagattatttttttgtattatatttttagaagtagaaatttagggttaagggattttgaatattttaaggtatttgatatattttgataaatttttttttgtaggtaataaattgtagttttattagtatatttttaatatattattattagattttgaagagtatttggttattttttttttaatttttgattaattttataggtgaataatattgaattttaaaatttgtttttattttttttagtatagttttagtattttataatatttaaagtatttagttttgtttataaatataatataatatattgattttttaaatgtatattttattgttaattttttagattaaaatgatttaaggtatttataaaatatagaatttatgtagaggtgttatttttatggagtaaatattggtcgttttttttttttataggtaatataaattatagatatttgttttggatgttttttttttttgattaggatttttttaaaagggtaaaggttaagattttttcggattagtttttcgttttatttttagtagtagatttattagaaatagatttattttttatattatagaattgttttcgtaggtttttattttattggtattgattattttattttgaaagggtttaaatttgatttttttggcgataaaattattgtagaatatattaaaatgtgggattttattaaatatcgtttgtatgaggtatagatttaggggaaagtcgaggtaggaaaagagaatgaggagagttgattttgtattagtttagggaaagaaatttatgtaaggagttttgtttattttttggaagttgaagggagtttttatttagagtttgaggaagagaattagattttagtaaaaggtaggttaaaataattttttattaaaaatgtattataaagtgtttttatgaggtgtttttttttttaattttttaaaggtaattattattttagtttgatatttatttgttgtttttatttttttttgtttattttatatggtttgtttatatacgattttattgtaaataattttatatataattttttatttgagatttagaatagttttatggaagtttatgtaattaattttattaggtaaatttaaggaatttgaggattagaggtaatgtttgattaaggttagcgtagttagttgagttgggattgttaggtgtgaattgttgaaggttgttattgtatgttagtatagaatttgaatttatttgggagttcgttgtaggaattattttttttttggtttttagtttttattaaaattaattttagttatgtagttaagtaagtagggttttagaagtgagtttagaatagttttggtttttatggaggtattttttttttttcgtattttgtagttttagttttatttggaagcgttttttttcggatattttcgttttcgtttgtattttcgtttaattcgatttttaaatggtgtgaattttttttattagagttgtttggggggattaggaggtttgaaatcgtatggtgtaggttggttgggtgttttaggttgggagtgatttcgtatagaacgaagtgtaggttttttttcgtgaattggaatcgagtaggggatttttttttttggttggagggtttgggattattttttgattgtttgttgggtgagtaaggtaataattgggaggtttttagttttttaggtaatagagaagtattcgtagggggcggtggaattaaagtgttaggtttataatacgggttattttcgttgtcgttattaatgatttggtggtttagatttttattgttggtattcgcgtattcgtggttgttgtttaggaagggcggtatttttttggggacgtggggaattgggtattacggtggtagtttgttgtattagggtagatcgtagagaggttttttttgtaggtttagattcgggtttagtaagggaggcgttattcggaaggggaaggggggtatggcgggggtagtagacgttgcggtttttagttgtcggaaaggttggaagtttttttttacggtggttaggttgtttttgtagtgtttataggacgggaaaggcgtgtagtacgcggttaggttttgcgggttgtttttcggcgggtagtatattttgttttgaggtacggttttatttggtcggggtagagttatttcgggatcgtacgttcggcggttttgtagaaaagcgggcgtcgttgaggatatcgcgcgggagtttttcggggttcgattcgcgtttttttattagttttttttattttagttagttttagatttaagggaataggataaacgtttttagttcgatttcgttagttcgtttttataattaagataaaacgaaaaaatagtaatagaagtaaatataaaaaagttttaaacggaaatttgtcgggattttgttttattttaaatttcgggttagtgttgttttttttttttttttttaagtattttttttttaagttcggtcgtttttttatattcgtttttcgttttcggtttttaattcggtttttgtaaaatttattgaagttttttttttttttttttttttagttttataaaattcgttggtagggtttgtgggagtcgcggggttttgttaatttcggggttgggtcgggagtcgagcgtaggcggtcggagggtaatggagtaagcgatagttttaggcgtttttgggttttcggttgggagggaagagtcgaggattttgggtcgtatcgcgtagatggagacgcgtttttagagttttcgggtaggtttagggatttcgcgatttgttttggtttagcggtgtgatttcgcgggttttggcggttttgattgttcgtaggggaggggcgcgttatttttggttgttttaggatgcgtcgtttgaattttttttttttcgcgggtagcgttcgttatatttttcgggtttttcggaaattttaattattttattaggattattggggtttggggtagtttttcgggagtcgcgtggacgagttttggttaggtgggagcgaagagtttcggcgattgttagttttttcgttttcgtatcgtcgggaaaggatggcgttttaatagataggtagtaagtttatcgaggttgaagaatgaagtttttttagggtcggcgggttttgagattaatgagtttaataagaaaattaagtagggttatgatttagaaattaaagaatacggggttaggagaagaggttagttacgatataggtagcggttcgttttttttcgattttttaaaggcgttttttttttagtttttttcgattttagggatttgtaatttgggatttaaagttttcgagagggtagaacgattatttaaaacgaattgcgttagcgagtgttgtcgttttttttaacggttttggaagattatcgtttcgggttttaggcgcgttttgtttcgtgtttattttcgatattatttttaagagcgttatcgcggagcgggcgttttttggacgttgcggggttattcgggttcggtaggttattcgggttcggtagatttcgggcgggttttgagggttgagttaggtttaagagggcgggcggggtcgcggggtatcgataggtcgagggtagggaattgattcggtttacgtagattttcgcgtcgtttttttttcgtttatcgtagttattggtcgattttcgattcgttttttgttttttggggtcgtttatttaatttattagttttttaaattttttttgggattttagtggcgagtattcgtcgttggttttttagggtaggtagtattgtcgttttaggcgtgcggagtcggggagaaaaaaatcgaatacgtgtgttatttagggtttttagataagttttttcgcgcgtatatatattttgaatcggagtttagaaggtcggattcgcgtttcggggtcgagttttttatttttcgtttttagttcggaagattttagtttgttcgaaggcggcgt

SEQ ID NO: 104 - DNA, 20043 bp, Artificial Sequence
  chemically treated genomic DNA (Homo sapiens)
acgtcgttttcgggtaggttgggatttttcgaattgggagcggagagtaaggggttcgatttcgggacgcgagttcggttttttggatttcggtttagggtgtgtgtgcgcgcggaggggtttatttgggggttttgggtagtatacgtgttcggttttttttttttcgatttcgtacgtttggagcggtaatattgtttgttttagaaggttagcggcgagtgttcgttattagggttttagggagggtttggaaaattgatgagttaagtgagcgattttaggggatagagggcgagtcgagagtcggttaatggttgcggtgggcggggagaagacgacgcggggatttgcgtgggtcgggttaattttttattttcgatttgtcgatgtttcgcggtttcgttcgtttttttaagtttggtttagtttttagggttcgttcgaagtttatcgagttcgagtggtttatcgagttcgagtggtttcgtagcgtttaggaggcgttcgtttcgcggtggcgtttttggaggtggtgtcggaggtaggtacgggataggacgcgtttggggttcggggcggtggttttttagggtcgttggggagggcggtagtattcgttggcgtagttcgttttggatggtcgttttgttttttcgggggttttgaattttaagttgtagatttttgaggtcggaggaggttaggagaagggcgtttttggaggatcgggaggagacgggtcgttgtttgtgtcgtggttgatttttttttttgatttcgtgttttttaatttttgagttatgattttgtttggtttttttattgggtttattgattttaagattcgtcggttttgaaggggttttattttttagtttcggtgaatttgttgtttgtttattaaaacgttattttttttcggcggtgcgggggcgggaggattggtagtcgtcgaggtttttcgtttttatttggttagggttcgtttacgcggttttcgaggggttattttaggttttaatagttttggtagaatgattggagttttcgaggaattcggggaatgtggcggacgttgttcgcgagggaaaagaggtttaggcggcgtattttagggtagttaaaagtggcgcgttttttttttgcgggtagttaggatcgttaggattcgcggggttatatcgttgggttagagtaggtcgcggggtttttggatttgttcgggggttttgggagcgcgtttttatttgcgcggtgcgatttagggttttcggttttttttttttagtcgagggtttaggagcgtttggagttgtcgtttgttttattgtttttcgatcgtttgcgttcggttttcggtttagtttcgaggttggtagggtttcgcggtttttatagattttattaacgagttttgtaggattgagaagaaggaaggaaagggaattttaatgggttttgtaggaatcgggttgggggtcgaaagcggagagcgggtgtgggaaggcggtcgggtttagggaaggggtgtttggagagggaaggggaaggtaatattaattcggaatttagagtagggtaggatttcggtagattttcgtttggggtttttttgtgtttgtttttattgttgttttttcgttttgttttaattgtgggagcgggttggcgggatcggattgggggcgtttattttgtttttttggatttggggttggttggggtggaggaggttggtggggaggcgcgggtcggatttcgggaagttttcgcgcggtgtttttagcggcgttcgtttttttgtagagtcgtcgagcgtgcggtttcgggatggttttatttcggttaagtgaggtcgtgttttaggataaggtgtgttattcgtcggagagtagttcgtagaatttggtcgcgtattatacgtttttttcgttttatggatattatagaaatagtttggttatcgtggaggaagatttttaattttttcggtagttggaggtcgtagcgtttgttgttttcgttatgtttttttttttttttcggatggcgttttttttgttgagttcgggtttgggtttatagagggagtttttttacgatttgttttggtatagtaagttgttatcgtggtatttaattttttacgtttttagggaagtgtcgttttttttgagtagtagttacgagtacgcgggtgttagtagtgaagatttgggttattaaattattggtggcgataacgagagtggttcgtgttgtggatttgatattttaattttatcgttttttgcggatgtttttttgttatttgaggggttgaggattttttagttattattttgtttatttagtaagtagttagaggatggttttaaattttttaattaagaagggaagttttttgttcggttttagtttacggaggaggatttgtatttcgttttgtacggggttatttttagtttggagtatttagttagtttgtattatgcgattttaggttttttggtttttttagatagttttggtaaagggagtttatattatttgggagtcgaattggacgggaatgtaggcgggaacgggagtgttcgggaagaggcgtttttaggtggagttgaggttgtagagtgcgggaagggggaagtatttttatgagagttagggttgttttaggtttatttttgaggttttgtttgtttaattgtatgattaaggttggttttagtgagagttgaggattaagagagaaatggtttttgtagcgaatttttaggtaggtttagattttatgttaatatgtaatgatagtttttagtagtttatatttaatagttttagtttagttagttacgttgattttagttaggtattatttttgatttttaaattttttgaatttgtttaatggggttaattatataaatttttatgaggttgttttgagttttaaatgagaaattgtatatggaattgtttatagtgaaatcgtgtatgaatagattatgtaaaatgagtagggaaaaatagaaataataaataaatattaaattgggatgatggttatttttagggaattaaggagggaaatattttataaaagtattttataatgtatttttaatgaaaaattgttttaatttgttttttgttaggatttgatttttttttttaaattttggataaagattttttttaatttttagaaggtaggtaggattttttgtatggatttttttttttgaattaatgtagagttaattttttttattttttttttttgtttcggtttttttttaggtttatgttttatgtagacggtgtttggtgaagttttatattttggtgtgttttgtagtagttttatcgttaaaggagttaggtttgggtttttttaaggtaaagtggttaatgttagtgaagtgaagatttacggagataattttgtgatgtgggaggtaaatttgtttttggtgggtttgttgttgaaaatggggcgggagattagttcggggaaattttggtttttgtttttttgggagagttttggttagagagagaggatatttagggtagatatttgtggtttgtgttgtttgtaaaaggaaggaacggttagtgtttgttttatgaggatagtatttttgtatgaattttgtgttttgtgggtgttttaagttattttagtttggaagattagtaatggaatatatatttaaagaattaatatgttgtattatatttatagataaaattaaatgttttagatattatagagtgttgaaattatgttaaagagaataaaaataagttttaaaatttaatattatttatttataaaattagttaaggattaaaaaaaaaataattagatattttttaagatttagtgatgatatattagggatatgttagtgggattgtagtttattatttgtaggagaaaatttgttagaatgtattagatattttaaaatgtttaaagttttttgattttgaatttttatttttaggaatatagtataggaaaataatttgaaattgaggttatgtggaatatgttaattttagggttgtttataataataaaatgttggagatagcgaaattgttagtagtagagaaagaagtaatttttttttgtttttttttttttgtttttttttttttgagacggagtttttgtttgttatttaggttggagtgtagtggcgtgattttagtttattgtgatttttattttttgggtttaagtaatttttttgttttagtttttcgagtagttaggattataggtatgtgttattatgttcggttaatttttgtatttttagtagagaggggttttattatgttggttaggttggtttcgaatttttgattttatgattcgtttgttttggttttttaaagtgcggggattataggtgtgagttattaggttcggttttgaaagaaataatttatagttttattaatatgtatgaaatttaattgggagtaaaatataaaattatttagttgtgtttaagtggtggaattaaataaaatttttttgttttatttatttttgtttatgaaattaatatgtgtttattataggaatttgggaagtaagaaagtgataaaagtaagaattttttagaatatgttatattaggtaggtttagtggtttatatttgtaattttagtattttaggaggttaaggtgggaggattatttgaatttaggagtttgaggttagtttaggaaagagtgaggttttgtttttataaaaaatttttttaaaaaaatttgttaggcgtgatggtgtatgtttttagttttagttatttagggggttaaggtgggaggattatttgagtttaggaattcgaggttattgtgatttgtgattgagttattgtattttagtttgggtaatagagtgagattttgtttttgaaaaaaataaataaatttaatatgtgatattatttagagaggtgtttttaaattaataaatttatgttggtataagtaaatttataaattatttgtaatgatataaaaattagaatgatagaagtgtatttggtggatttaagtgtgatatttaggttataagtattaaaaaatttattttatagattagattaaaaaagaagtataatataaattttatgttttattttatttagatttttgaagatggttatttgagttattttatagatggaaaaggaggtacggggaattggatgttttatgttaattgtgttcgtttttttaaggagtagaatttagttgttgtgtagtgttaagggtatatattttatgagagttgtaaagagatttattagaattaagagttttttgtgtggtatggagattgttatgagaaatttttggatatttttgtgagtttttaggttatagagtcggggaagtagttatttgggttttttgaaggtgagtgtatattttcgttttgtttaatgagggtattttagtagaaggattgggtttttttttataaattttttatgtatagttttttttttttaaaggttaatgtagaggattaatcgagagtgtttttaattaggggggaattatttaggtgaaggaaagtatttttaattttttaaagttgcggaagttatttttatttataaagatatatatttttatttataaagatttgttttttttttttattttttattttaagagtaaaagaaaacgtattaaatggatgtaatttttattataggtgagttagtttttgatttatttttgtttaggttaatgtagttgaagtttaattattagagtagtgttttttaaatggtgggttgtagagttgtatgttttagtggggtgggaaattaatttagtggttaagatttatattaaaaaaaaaaaaaagtatagagtagaatagaaaatattgatgggaattttttaagagtaaggattgttttgtgaaatttttattttatatgggtatatgtgggtatggtgggtgttaagtataaaatatattgtttattatgggttttaggtaagtttgagaaatattgagttggatttttatttttaaattttaatgtgggaatgaatatttagggatttttatgatgttggtttttatttagggtaggggtttaggatttggtatttttattaatttgtagggagtgttgttggttttggtttttggtttatattttagtagtaaggggcgagggaattattagtttattttaggggtgagattttggaatttgtatgttaaataagttttttaagtgatttttatatatattgaagtttaggaattattaatttagtaggtgggataagataaatgtaaatttttgtaaataagagagaaggtaggtcggatattgtggtttatatttgtaattttagtatttttggaggcggagatgggcggattatttgaggttaggattttaagattagtttggttaatatggtaaaattttattttaggtcgggtatagtggtttacgtttttaattttagtattttgggatgtcgaaatgggtagattattaggttaggagattaagattattttggttaacgtggtgaaaattcgtttttattaaaaatataaaaaattagcggggcgtagtggtatatatttgtagttttagttatttaggaggttgaggtaggagaattatttgaatttaggagatagaggttgtaatatgttaagatcgtattattgtattttagtttgggtaatagagtaagatttcgtttttaaaaaaaaaaaaagagagagagagaaggtaaattattatgatgtaataaatgtgtaaggagtaggtttaaaaaaaaaatggtttaggcgtggtggtttacgtttgtaattttagtattttgggaggtgaggcgggcggattacgaggttaggagattatagttattttggttaatacggtgaaattttttttttattaaaaatataaaaaaattagtcgggcgtggtggcgggtttttgtagttttagttatttgggaggttgaggtaggagaatggcgtgaatttagtagggggagtttgtagtgagttgagattgcgttattgtatattagtttgggcgatagagcgagatttcgttttaaaaaaaaaaaaaaaaaaagtaaattgtatttgtatgtttgtttttttgttaggttgagatgttttagggtaggaaataattttaaatattttagtatttcgtgtttttggattttagtgcgtattgattgagaggaagatattagaattaagttagaaaaagttgtttagggatgagatgaaataaggtacgtgtaagagggagagagggaaggtaattaggtttagggaatagtgaagtagaaggtaaggaaatgtttagaaattagggggtaaataataagtagttattatttatttaatgataaataatgagtagttagtcgttattatttatttaatgataaataatggttttaatgatgaggggttgttaggattgttttggtgaattatttttttatttttttaggtattttatgtttatgttgggtttttttcgttattgaattattataagtttttattttgttgtttgttttgatcgtttttgatatttgtatataggttgagtattttttttttgaaatgtttgggattagaagtgttttggtgggtggtgtgggtgtgggaatgtaggtgaagataggaatggaggtaaaaatggttgggattttttatgatttgtggagttttaagttgttttttatttagtattaaattaagatttgttggttattttttgaaatgtattaatttttttcgaaataaaagttaataggttgggcgtggtggtttatatttgtaattttaatattttgggaggttaaggtggttgggttatttgaggttaggagtttacgattagtttggttaatatggtgaaatttcgtttttattaaaatataaaaaattagttgggtgtggtggtgtatgtttgtaattttagttatttaggaggttgagataggagaatcgtttgaatttaggagtagaggttgtagtgagttgagatggcgttattgtattttagtttgggtgatagagtgagattttattttaaaaagaaaaatgaaagaaagaaaagtgaataatggatttgagaaaagtatttgtttagtaattggtaagatggttattatttttttgagaaattattattattttttgagatagggttttattttgttatttagattggagtatagtagtgtaatttaggtttattgtaatttttgtttttagggtttaggtattttttttgttttagtttttcgagtagttgggattataggtatgtattattatatttagttaatttttgtatttttagtagagatggggtttcgttattttggttaggttggttttgaatttttggatttaagtgatttatttattttggtttttttaaattttgggataataggtatgagatattatggtcggttatttttgagaaatttttttatcgtatgtattaaattattataatgtttgtaattttgatgttttagtaatatttttttggaaatttattatcgagaaatagtttaaaaggaaaaagttatgtttatgaaaatttttaattgtggtattatttttgtgagtgaaaaattataaataatttaaatgtttagtagtataataattaagtaaatgatgatataggtttagtagttttaattaagaaattttaaatttaaaatgttttaaaatttgaaattgagtattgatatattgttaaaagtgggaatttttatatattagtatttgatataaattttgttttatgtataaaattatttaaaatattgtgtaaaattatttttaggtgggttaggtacggtggtttatgtttgtaattttagcgttttgggaggtcgaggtaggtagattatttgagattaggagtttgagaatagtatgataaatatggtggaatttcgtttttattaaaaatataaataaattagttgggtatggtggtagatgtttgtaattttagttatttaggaggttggagtcggataatcgtttgaaatcgggggcggaggttgtagatcgagtaagatttcgttttaaaaaaaaaaaaattatttttaggttatgtgtataaagtatgtataaaataaaatataaatggattttatatttagattttggttttatttttaagatattttattatgtatatgaaatattttaaagttcgaaaaaaatttgaaatttaaaatatttttggttttaagtattttagaaaaaggatatttaatttatttgttattaatatggaatagtatgtcgatattagaggtaattagagtaagtaatagaatgagggtttatgatggttaagtgtaggggatatttagtatgtagataagatatttgtgttttagttttgaattaagtgatatttgatgtttatagtattattatgaggatatatattttggataatggagggaaatttgtaaataatttaatttgttgggaataattataaatgaatgttaatttgttaatttgttaatatgaatggtttggatgtgataaaaaggaaagaaaaattaaaattttattgtatttttaaatgagtttttttttttaaaggttttttggtggggattggtggtaggtgggagtttttttttttaaggttttgagtggtgagggaagggtttagattttatgtgggcgggttatttgaatatgtaagtattttttttttgtgagggagagagggaatttgggtgtgtgttttggggtgtggaggtgtgaagagttagggggagggaggatagggaataagataaaattaggaaggatagggaataagatgaaattaggttttatttttatttaagtggttgtttttaagcgaatttagtattgaaattttattttgaattttggtgtgttttagtgtttaggtttgtaaaattgttgatttttttttttttttttattttaggaagtaggaaggttaggtatttttgattaataaaaattttatttttgtgttaaaaaagtgttttagtacggggattttgagagtattagtattttaatgaaagtgatagatagagtagggcgatggattagtttggggttggtagttgtttttttggttatttatttaatgaatagtttatttttttagttatttgttaaacgtgtttgggatgtagttgttaattaataaagtttttgatggatagtttttttgttgttttgatgttgagaagatttttatttgtagatttttgtatagatttatttttggttgttttttttttttggggttaaataatgagatttttgtggtgtatttatagttaaagttattttattttttgggatttagagtgttttttgtagggatgtttttgtaggtggtttttgttttttcgtttttttttaatatatagatatttttggacgtgggatttgttttgttagagtttagttgtattttttttaattttttttttttttttttttttattgataaaaatagatttattttttagttttgtttgttatttagtgatagtattatttatattggtaagattcggtaagtgttagaattaaattagttattacggtaattttgtgtattagggaagttaagatgtttttaattttattttatatataaagattttagttttggaatttgttataagttttgagtaatgaagtataaattaagaaggttttttgaattgtgtagaatagaatagtattgtgagttgcgggtgttttggtgattgttttgagtttgtaatttaggttgattttaaaggtataaagagaaataggtcggttttagtgttttagtgtattaattttgtaataagtgttaggtaggaatgtgtttaagagttgtagggttgtattgtttttaaatggggttggtggaatggtttttttaatagtatatattaaggaataaaagggaaagagagtttataggttaagatatttaagagatatagtaattatatataatatgtagattttgtttgaagtttaatttgaatggattgattagaaagtaattaaataaatatatatgtgtgtatataaatgtgtatatataagtatatatatgtttttataaaagaataagagttaatcgtttaggtatgataatgtgataatgatattatggttatgtttttttttttttttcgagataaagtgttgttttgttgtttaggttggagtgtagtggtttaattattgtttattgtagttttaattaatttttttaggtttaggtgatttttttatttcggtttttgggattaaaggcgtgtgttattatgtttagataatttttattatttttttgtagagatggggttttattatgttgtttaggttggttttaaatttttgggtttaagcgatttgtttattttagttttttagagtgttgggattataggcgtgagttattgtatttggtataattatgtttttttttttttttttgagatggagttttgttgttgttgtttaggttggagtgtagtggtgtaattttggtttattgtaatttgcgttttttaggtttaagtgatttttttgttttagttttttaagtagttgggattataggtaggtattattacgtttggttaattttgtatttttagtatagacgggattttattatgttggttaggttggttttgaatttttgattttaggtgatttatttgttttagttttttaaagtgttgggattataggcgtgagttattttgtttggttataattatgttttttaaaaatatgttattttttaaagattacggttagatgtttttgagttaaaggatgaattagtattaaaataatttattatggcgagcggtgatataaatgaaaataaaattagttacgagttggttaaagtttggtgtttggtatatgagggtttattatattattatttttattttggtatgtttatatttttttgtaataaaaaggtttttaaaaatttttttggcggtcgggtatggtggtttatgtttgtaattttagtattttgggaggtcgaggtaggtggattataagattaagagattaagattgttttggttaagatggtgaaattttatttttattaaaaatataaaaattagttgggcgtggtggtgtgtgtttgtagttttagttatttgggaggttgaggtaggagaattatttgaattcgggaggtggaggttgtagtgagtcgagattatatttttgtattttagtttgggtgatagagtaagattttattttaaaaaaaaaaaaagaaaagaaaagaaaatttttttgattaggtatagtggtttacgtatgtaattttagtattttgggaggttaagaggggttgattatttgaggttaggagttttagattagtttggttaatatgatgaaattttgtttttattaaaaatataaaaattagttaggcgtggtagtgggtatttgtaattttagttatttgggaggttgaggtaggagaatcgtttgaatttgggaggtagaggttgtagtgagttaagatcgtgttattgtattatagattgggtaatatagtaagattttgttttaaaaaaagaaaattttttttgaagtagttaaagaatttttggttaaaaataaataaataaataaatatttttttgaaggaattagggagggaagtaattgaagagatattgtgtttgttgtgtttgatagagtttgtagaaggttatagatgtgaaagatgtgggaaggtatttatttataaatattatagagataagtattttaagtatattttttgtgtggataagggcgataggaaatttttttgttttttttgtaaacgattttttgagaagcgggatcggtttcggatttatattttttatgtttatgagaagtatcggttttataaggtgagtattaggaggatatatgatttattattacgttttttttttttttttaagtttttgaatacggggagttgttttgtaggtgttagttgtagggttgtgatgtttgacggatattttttttgaaggaggagaggatagtattacggaataggtaggcgtgaataggtatagcgatgtatatgtgttaggatgtaggtatttatagagggaggaatatggaggaaggagtgtttacggttatttggatacgtggattatgaaagatgtatagaggtggttttgagttaagtatagaaggataaatggggtgtttgatttatattggtggtagggttagttgggtaggaaagagtcgagttgttttagataggagagagtttggtatgtgtttttggggaattgcgttttgttttaaatttgtgtaggtgtgttgataggtataggtaagaaggaagtgaaggtacggtttttttaaggagcggaaggtttttatagtgggtcgaggattttgtaagatagaaaattagtaatgatattacggagttattttaaatatttggatgttttgttaggtttgttgtaaaaaagtataatatttttttgggtttaattaaaaggaggacgaggtttgggtatagatgtatttttgtttgattgttggttttgtcggaattattttaggtagttacgattttgagtttatttttttgttttgaaaattgagaataaaattattataaaattgttttaatttttttttttttttttaagtttttggaaaagttatgtttaattattatattatatatttttataaaatttgaatatatttatagttattatgtatttgtgtaattttaaaaggatttaaaaatattaggacggtgaaggtatttttcgtttattagattggtaaaagtgaaaattatttagtattttgatagtgaaaagtttgagattgtatgtttattaatataaaattgattatataaattatggtttattggttaggcgtagtggtttacgtttgtaattttagtattttgggaggttgaggtgggtagattatttgaggttaggagttcgagattagtttggttaatatggcgaaattttatttttattaaaaatataaaaatattagtcgggtgtggtggtaggtatttgtagttttagttattttagaggttgaggtaggagaattgttttaattttagaggcggaggttgtagtgagtcgagattgtgttattgtattgtagtttgggtggtaggagtgagattttattttaaaaaaaaaaaaaaaatattgttttattaagtaaaaattaaattatagaagatgtatagaatgtttgttttttttgaaattggaggtcgggagtggtggtttacgtttaattttagtattttgggaggtcgagataggtggattacgaggttaggagattaagattatcgtggttaatatggtgaaattttatttttattaaaaatataaaaaattagttaggcgtggtggtgggtatttgtagttttatttattcgggaggttgaggtaggagaatggcgtgaatttgggaggcggagtttgtagtgagtcgagatcgcgttatcgtattttagtttgggtgatagagcgagatttcgttttaaaaaaaaaaaaaaagaaaagaaattggagggttgttaattaggaggttagtagatgataggattgatgaggaagttggtgatagtgagatgatggtttattttttaatagacgaggtgtttttatagtatagtggaggaataatttttttttttttttttttttttgagatagttttattttgttgtttaggttagagtataatggtatgattttagtttattgtaatttttattttttacgtttaaataattatttaattttagttttttaagtagttgagttgaggttataagtgtatgttattatgtttagttaattttttgtattttttgtagagatgggtatgtggtgcgtatttgtggttttagttattcgggaggttgagatattagaattgtttaaatttaggaggtagaggttgcggtgggtcgagattatgttattgtattttagtttgggtaatagagcgaggttttgttttaaaaataaataaaaataaataaataaataaatataaagatttgtttttttttttgttttataagtatgtttggaaagaggttgtgaaagtatagaaattttttttagagaaaaattgttttttttttttagttagtgtaatttttttaaaagtgatgttaaaattaaaggttttttgttttatttttggtaaattttcggtgtttgtatttttttggtagtttattttatttggtgtagaatttttgagatagtttcgagaggagttgttagggttaagaaataatattaattatttatagcgtgtgaataaaatattaatttttttatgtaagtttaatacgttttagataatttgttattgtgtattattatgttggtttatatgtttatcgttatttttttttgatttttagtttttggtttttagtagtgtggagtatatagtaggtattttgtaagtcgtagataattgttgagttaattgtatagtatttgtagtttatttatagttttgtgaggaaggtagagtaggtattttgtttatgagtaagatcgggaaattaagattttagatttaattaatgttttgtagttatatagttatttgttgagagagtaggattaatttaggtttttgttatatattataaatttgtttagtttttatattttatatttgaagtaagagtttttttaggtcgggtgtcgtggtttaaggttataattttagtattttgggaggttaaggtaggaggatttgttggagtttaagataaggttgggtaatatagtgagattttatttttataaaaaaaaattttttaagttagttggtttagtggtacgtatttgtagttttagttatttaggaggttgaggtgggaggatcgtttgagtttgggagttttaggttgtagtgaatcgtgattgtgttattgtagtttagtttgggtaataaattgagatttcgttttaaaaaaaaaaaaaagaaaaaaattggaaaagagtttttttttaattttaggtaaacgtaaggttgaaatggatttgttagaggaaggtgtgattttaattatattttttttttttattttagtgttttatatgtgggaaatgttttttttaattttttagtttaaataaatatatgcgagtttattttggagatagattatattagtgtgtgtattgtattaaggtaaatggaattttttattaagggatgtgttttgagttttgtttgagtgtttatggataagaatttgaaataaagtttggtttaatgagtttttggtaaatgttagttaaatattagtttagtttttatttttatttttaaatatgtttaagtttgttaaagatggttaaatataattaattttttattgttaagttggtatttagagtatatgtaataaaatatattttaaatttatggggatttgatgatttattatatagtatttaaaagtattagttgagtgtggtggtttatatttataattaaattttttatgtatcggtggtttatgtttgtagttttagttatttgggaggttgaggttggagaattgtttgagtttaggaagtggaggttgtagtgagttaagattgtattattgtatattttagtttgggtgatagagtgagatattgttttaaaaaaaaaaggagggggtggggaggcgtggtggtttaagttcgtaattttagtattttgggaggttgaggtgggtaggtgtttggagatagggagttcgagattattttggttagtatggtgaaattttatttttattaaaaatataaaaattagttgggtatggtggtacgtttttgtaattttagttatttgggaggttgaggtaggagaattatttgaatttagaggtagaggttgtagtgagttaagattgtgttattgtattttagtttgagtggtaaagtgaaatttcgtttttaaaaaaaaaaaaaaaaaaaaattattattttatagtatttaagaatataaatatggttaagttttaaattttgtttttggtgtttatttagttgtgttattttgagtaagtttatgaatttttgttagtttttatattgataaattggggagaatagtttttattaagttgttggataatattagtaaagtatataaaatttttgtaatagtgtttggtataatataaaagtattattggaatgttaattgttattattattattttaatttgtgaaggatgttattgatgtaattttttataggagtattgtagaagcggtatttagtttatgttatatagaatatagagttgtaaaaatagagatgaattatgtggttagaggttgttataatagaaataataggttgattacgttttagatatattatattaaaatagttttatgttatttaatgtgtagttcgcggttaattatatgtggttattttaattagtaaagacgaagtaaagttgaaaaatttcgttttttaggttgtattagttatattttaagtgtttaatggttttatgtggttattgatttttaagatggatagcgtgggtaatgaatatttttattattgtagtaagttttgttggaaagtattggtatagattatgtttttagttattgagttatttacgttttttatagtaaagtcgtaaaaggagtagaggttgttttatagttatttttaagttttttaaaaggaataaaatattgagtttattagattagagtaattaatatttttaaagtgtgtgttaatagaatgaaaataatgggtatagaaaaatattattgagttgggcgtggtggtttatatttgtaattttagtattttgagaggttaaggtgggtggattaatttgaggttaggagtttgaaattagtttggtcgatatggagaaatattatttttattaaaaatagaaaaattagttgggtattatagtgtatttgtaattttagttatttgggaggttgaggtattagaatcgtttgaatttgggaggtggaggttgtagtgagttaagattgtgttattgtattttaatttgggtgatggagtgagattttgttttaaaataaataaataaataaataaataaaataaatttataaattattttaaaaagtttaaattaaaaagaagaagaagaagaagaaaattagtaaggtattgatttatgtaaagatattggtcgatattagtttttggtcgatattagtttttttttttgtaatgaggtttgttttgaagtatgattttaggatttatatgtattagaattgtttgtttaaatgtaggtttttgggttttatgttagatttattgggttatatttttttgggtggggttggtaatttgtttttttttttttttttttttttaaagagagggttttgttttgttatttaggttggagtgtagtggtgttattataatttattgtagttttgattttttggtttaagttatttttttattttagttttttaaatagttgggattataggtatatgttattatgtttaggtaatttttttattttttgtagaggtgaggtattgttatgttgtttaggttggtagtttgttttttttttttttttttttttttttttggagatagagttttattttgttatttaggttggagtatagtggtgtaataacggtttattgtaattttcgttttttgggtttaagaaatttttttattttagttttttgagaagttgggattaaaggtgtacgatagtatgtttgattaatttttgtatttttagtagagatggggttttattatgttggttaggttggtttcgaatttttgattttaggtgatttatttgttttggttttttaaagtgttgggattataggtgtgaattattgcgtttagtttgtaatttgtttttttataaattggatttttagataatttagttattgaagaattattgttttaatatttagtgttttttaaaattagttagaaggatatattagtggagttttttcggattaaggttattgatgatgattaggagtgttttatggttttaaaatttaaggttcgtttataaggatgagtaatagtgaaatttattttttagtttaattggttgtttagttcgtggaagttgatttttttttgtgttttgtatttttgttttttgtagaggtttatagtttttagtatatttcgtatatatattaggtagtatttcggggagaagttttttaaatgtaagtattgtggtaaattttttgtattttatgttgtttatgatagttatgttcggcgtttatataaggaggatgatggttgtttatgtagtatttgtgggaaaatttttttagattaagaaatattttatttttatatgaagttttatgaagattattagttttgttaggtataatgatttacgtttgtaattttagtattttgggaggtagaggtgggtggattatttaagtttaggagttcgagattagtttgggtaatatggtgaaattttgtttttattaaaaaaatataaaaattagttgggggtggtggtatatgtttgtggttttagttatttaggaggtcgaggtggtaggatggtttgagtataggagacggaggttgttgtgagttgagatcgttttattgttttttaatttgggtgatagaattagattttgttttaaaataaaataaaataaaaaaaatgagtagtttttaagagtgtggagataatgtaaaaataagagattcggattttttttatttttttttatgggttatagaagtttttgtagttggttgtgtgtggtggtttacgttt

SEQ ID NO: 105 - DNA, 7201 bp, Artificial Sequence
  chemically treated genomic DNA (Homo sapiens)
gttagtggcgttgcgttgaatgtaattgcgcgcgttcgtcgggtgagttagcgatttgagttaggcgggggcggttcgatttttttcgtttagtttgggttagaggaagtcgaaagcggttttagtaaggtgaggcgttcgaggttgtagaagatcgagtagaattttgtagagttcgggatgtgttgggttaggtcgttgaggatttgattggttttttttttttttttttttatttattttttttttttttttttattatttagtgggttcgtttcgggtttttagttattagttttcgatttcgtgtttgagggtagcgatttcgatttttgtttgtatgtatagttagtagttttagcgttagattttaaagttggatattttttaattgggttattagttcgggttttaaagttttggtgagtgttgtgatgtcgttcggggtgttagggagggtaaagggcgtgaattattttttattttttttgtgtgatttggatgttttattttaaatatataaattaaggtttaagtatagagagtttacgcggtttagttttgtgtattttaggtattattaaggttggacgggcgtttgtattgtgttttttgtttttatgggacgttaatgataataaaattttggtttttagttgagtattttggggaggggggtgagaggatttttttaagtttaaggaggggtttttgtggtggtgtaggttgatgagaggtatttgggaagtatagagtggtattttagtgagtttgaagggttatttgtaattaaaggaaaattgtttttttacggatagttttatatgtattatggttatattagttgagtatggggaaattcgataagtggtttggggttgtttatttggatataatattttgtgtgtgtgtgataagtgagttatttagggatttgttcggaaagttcgtgtaaagttagagagggttacggttaaaggttaggtatttatagagtatttagaattaataaaataaaatttttgttgggttgtggatttttgggggttttggagatataggaaaggtacgtgtggtttggaagtgagggatatgtaatgagaataggatgatttaagcggtcggaggcgggtagattaggagttttgggtcggaggtttagggatggtttttgacggcggtcggtgggtttttggatttttttgtgtttttttagagtgagggtcgttaggtttaggttttagcgaagtttcgagcgttatggtcgattcgtaggttggtttcgcggtcggggattgggagatcgatgtcgagagtttggagttggaagaggacgtttgcggggcgtcgcggtttacgtttttcgggtttagttcgtcgtcggcggacggggattgcgaggacgacgaagatgacgacggggtggacgaagacgcggaagaagagggcgacggcgaggaggtaggcgcgtttttcgggatgttcggttagtcggagtagcgggggggatcgtagtcgaggtcgtcgttcgcgttttaggttttattcgtcggtatcggttttcgagagcgttgtattttcgcgggcggcggcgcggagtcgcgtaagttgagtcgtacgtttaagtgcgcgcgttgtcgtaattacggcgtggtgttttgtttgaagggttataagcgtttttgtcgttggcgcgattgttagtgcgttaattgtttgttggtggtggagcggtagcgcgttatggtcgtttaggtggcgtttcggaggtagtaggttatcgaggtgcgtattcgttcggttcgggcgttttaggttatagtggaggtgggggagttggaggggagcggggcggtcgtttatatttttcgcgtttagggttttgcggtgtttggtattttttaggaaggatggtaagaacgtttttttgtttgtattggcgagtagggtcgggagggaaaaagtaggtatttttggggaatttgggaaatgtttttgttttaaaaagtaggtagagaggttttgaaagtgtttaggtttatttggaatatcgcgagaaaattaatgtttttatttttttgtattttaaagtgtattttcgtggtgttgagggcgggggtttggggggagagtggttgatttatagtacggcgtgtagttttaggttcgttattgttgtattggtgatgatggagaaaaagaattacgtagtacgtatgcgttcggtgttttagttgttatttggacgtttgagatatttagaatatttattttatggatgagatataaaatgtatgagaaattagatgtttgtagtttaaggttattaattcgaagttattgtttttgtaaattatttaagagtaaggggagggtttttgttgttttttatcggaggattttagttgcgaggagagttagggtttttttttcgagagacgtttttgaattttcgattttgtatttgtttttatgtgcgtttggatagggagagtttagcgagcgaggttttatagggtttttttttagatttaggattagggaagatttttaattttattttttggcggagaggagttggggagtggatcgttagatatattgaaggtagtaattttattggaaagtttttcgagggtttaggagagcgcgttggacgttatgggtatttggttttgggtttggttttttttcgcgtttcgtatgggttatcgtttgttttgcgtttttacgcgttttttgtagtatatgttgggtaggacgcgggcgtgggagggtttagaattttattagttggtgggataggtgattgtagaggcgagggtgggtgttcgtaaagcgtaaatttggagtttgtagtcggatttaggagatttttatttttttatttttttattattttattttgtttgttttgttatagggagaaattcgttcggttttattgttttatagtaggttttgggtattttttattcgataggtgggtttttaggatttagtttggttgtaattattttttgaggtcgggtgtttttttgaaagggattttatttttttattttttttcgggatgtttttttatttttggttataggtttgcgtatatttagagtgattagagtttagagtgattatgttgcggaaagtaggggatttagtttattagttgaggttttagttttttgttttaggattaaggggtgttgatattaattcgtttgtaattattttttatacggaatgggaaaatttaatatatttagaagggggagagtttttagaagatttacggatatttcgttttttttttttttcgtttttatttttttttagggtattattgatgatgttttttgtgtttataggataagaaggggtttttcgggaaatagaataatttcgagcgtaaagttgtgtattagaggtaagttagagtttttagtttgttggttaaaagtattttagaaggtaaagtaataaaattattttttagttttttaaatagagttgagtgatttttattaattagtataaagtgtgtttattaatttgtgaaagagttatttaaagggaaagtattttttattagaaaggttttgtttaggtgttcgttgagttcgtacgttaaaattgaattcgtacggagaagattagtatggttcgggaattagaaagtttttttttaggaaggaaatcgttatttgggaaaatgaattttatatattttttgaggtttttgttattattagttgaagaatttttattatttggttgtttgtttagtggttaatcggttaatgtggagtgtatgtgaaatttatttcgtatgagggatgtataaagatatattgttaagtgattttggagtagatgttttggaaggaaataaataatttaaataaagtaaaataaaataatataattacgtttattttttttagttgtgggagttgaatagatgaagttaagtgaggagtttaatagttgttcgtaattagtaaagtcgtttagtttggaagtttaattttagatttcgtttttttttattgtatttttttttttttttttggattatttggataatttttattattttaaattttatttttattattttttgatagttaaggttatagaatttgaaaaaggtttcgaatttagtaagcgaagtggaggttgaatgcgaatagtgcgaaatttttagttttttgtttttatgtttttattttcgtgaaagtttgggggtatattaattttttttaaaatattatttatttttaaaagtatttttatttgggtatggaatttatttattgattttaataatatattgattatttttaatcgtttttttttaaatttttaaaaatttaaataagggataattaatgtttgttttaattattgttattttatgaaatttaggttgaaagtaaataaaaatttttaagtagatatttggattttgttttttttttgtgtagtttttgaattttgttggttttggataggtttgtgtgtgttttataaaaatttttaagtagatatttggattttgttttttttttgtgtagtttttgaattttgttggttttggataggttttgaagtttgtgtgtgttttattatgtgttgtatatttttgattatagagtggttttttatgaattaaaaatgaatttggttataaattggataaatagatttataataatagggttatattgataaattgagattatgtaaagtaatttgtgaagtttgaggattaaatggaatagtaaatttaattaaataattttttggtaaaaatttattatagaaatgtaaatattaatttttaaattttattttatttgtaaatgagtataatgggtttgttattatgtaaatataaatataataatggatgttttaaataaatatgatagaggtgagtgtttgggggtgatgaaatattttaagtattttatgtttttaggaattttatttatgttatattaatttttgtatttgagtttgtttttattcgtgcgatgatttagtttgtgttttaatgattgtttgtttaattattttggtattcggttaaaatgattagagtttgggaagaatgttttagaatagttattttcgatagagtagggaatatttttcgttttttttgagttttgttttattttattttatttttttttgtagtggtattaggggaaggggtttggttaaattgtttattgtagagtgtgtttgattagttaatagttttttttaattttttatgtttttttatttttttaagttttttttttttttttttattcgttaattttttttaattttttttttttttttttttttttagttttttttggattattttatagttattatgtgtatataatgaattatttttagaaaataaaagtgatattagttttaggtatagatatattttttaataatgaaaaaagatgatatggataataataaaatattgattgatataagataaatagttttgttttttaatgcgtagggggtttgggaagaatattaaaattttaattaataaagtatgtttgttgaagtaagtaagtaaataaatttataataattataataagtaataagaataagaataataataagaagaagttgtagtatggatattttttatttttttaggaaatttttttaaatttaatttgtatttttgtatttgtataaaaatattagtgagatggaattgtaaataattgttttgttgatttgtagtgttgttgttattttttgggtttttatatttttatttcgtagatgttaattttttttatgtgtaatttttgttttttgtaggttatcgttttattttagcggagatttatgtaggagggattttttttttattttttttagttagtgataggatgaggaaaagaagagtttttgttgataaagagttggagaatattatgttggagagagaatataaagaaagggagatgttggaaattttttaagttgttgttttgtttttgtttaatcgtatggtgtttggatttgattataatttttataaaagtgtttatagttttagtttagtggaattattaagtaaggatttttgtaattttttgtttatttgttttgatttaattatgtagtatttagggtttgggaatatggaattaattttttttaatgttagcgtggttataatttatagatagtattttttgtttttaagatttttagtttggtttaagtgtggttttattagcgatatttttttttattagtaatgtttgttaaatgttattattttagtttaagttttgaagtttggggttagttgggatttgaagggagtacgagtttaggatggatttagtgtagagtaggatatgatgttatcgaaattggaaggttttttggtgttgttttatatttttgagatttagattacgagaagtgatttttagggttattaggttgttttagagaggttcgcgttttttttatttcgacggaattttttttttattgttgatacggattttttggtagtttaagggtatgttttaacgaagattagtaaagaaaatattaggtattttttgttatttagatataatttattttatttattattttagtaaatatttattgataaatcgggttttgagttgaaaatattatttgttaaagaggtttttgaagagatttttaagaaatatagagagtgtttagttaaggataattagaagtatatatttataatagatagatgtgtaaaagatttttttgtagttaaataagttggaataaaattttcggtgaatgaattattgttattttttgttgagtttatttttaagaggtttttatttgttattattcgtgttttttagtgaaaggttgtttaaatagaaagttggattttttgtagttttagagtattatagttatttgttattttttttaaaagttaagatgtttgtgtaaagaaatttttaatgtaaagatgatgattttgaaaaattttatatatttttaatatgtatgtatttttttttattatatatatttaaatttatagatggaaattgtttaatgtgtaaattgttaagtattatattttatatagtattttaaaaagtaataaaattgatattgtttttttaaagatttaata

SEQ ID NO: 106 - DNA, 7201 bp, Artificial Sequence
  chemically treated genomic DNA (Homo sapiens)
tattgggtttttgagaagatagtgttaattttattgttttttgaaatgttgtgtaaagtgtggtatttaataatttgtatattgggtaatttttatttgtaagtttaaatatatgtgataagaaaaagtatatgtatattaggaatatataaaattttttaaaattattatttttatattagaaatttttttatataaatattttaatttttaaaaaaagtagtaaatggttataatgttttaagattgtagaaaatttagttttttgtttaagtagttttttattgagagatacgagtgatggtagatgaaggttttttaagaatagatttaatagaaaatgatagtggtttatttatcgagagttttgttttaatttgtttggttataaaaaggttttttgtatatttatttattgtaaatgtgtatttttggttgtttttaattaaatattttttgtgttttttaggggtttttttaaaggtttttttgataaatggtgtttttaatttaggattcgatttgttagtaagtgtttgttggaataatgagtggaatggattatgtttaagtggtagagggtgtttggtgttttttttgttgattttcgttaagatatgtttttgagttgttagggagttcgtgttaataatgggagagaaatttcgtcggggtggggagaacgcggatttttttgggatagtttgatgattttgaaggttatttttcgtggtttggattttaggagtgtgaggtagtattagggaattttttaatttcgatggtattatgttttgttttgtattgagtttattttggattcgtgttttttttaagttttagttggttttaggttttagggtttgaattgaggtggtggtatttagtaggtattgttggtagaggagggtgtcgttaatggggttatatttgggttaaattaaaaattttgaggataagggatattgtttataagttgtggttacgttgatattagaagaaattagttttatatttttagattttgaatattgtatggttaaattaaggtaggtgggtaaaaaattatagaagtttttgtttggtggttttattgggttggggttgtaggtatttttgtaggaattgtagttaggtttaggtattatgcggttgggtagaaatagagtagtagtttgagaagtttttaatatttttttttttttatattttttttttagtataatgttttttaattttttattagtaaaggttttttttttttttattttgttattaattgggggaggtagagggaaggttttttttatataagttttcgttggaatggggcgatagtttataagaagtaaagattgtatatgaaagagattaatatttacggaataaaaatgtggaaatttagaaggtaatagtaatattatagattagtagaataattatttatagttttattttattgatatttttatatagatgtaaaagtatagattaggtttgaaagagttttttgggagggtgaaagatatttatattgtaatttttttttgttgttgtttttgtttttgttgtttgttgtggttgttatggatttgtttgtttgtttgttttaatagatatattttattgattaaaattttaatattttttttaggttttttacgtattaagagataagattatttattttgtattaattaatgttttattattatttatgttatttttttttattattaaaaaatatatttatatttagagttgatgttatttttattttttaaagatggtttattatgtatatataatagttgtagaataatttaaggagaattaggaaaaaagagaaagaaagaaagttaaaggagattagcgagtagaaaaagaaaaaaaaggtttaagaaaatagagaagtatagaaaattgaaaagagttgttaattagttaaatatattttatagtgaataatttaattaggtttttttttttgatattattataaaaaaaaataaaataaaataaaataaaatttaaaaaaggcggggagtattttttgttttatcgaaaataattgttttgaaatattttttttaagttttaattattttggtcggatattaaaatggttgaataagtaattattaaaatataggttaagttatcgtacgaataggagtaaatttaaatataaagattagtgtaatataaatagaatttttggaggtataaaatatttggagtattttattatttttaagtatttatttttgttatatttgtttgaagtatttattgttatatttgtgtttatatagtgataaatttattatatttatttgtaaataaaataaaatttgaaaattaatgtttatatttttatgataagtttttgttaggaagttatttagttgaatttattattttatttagtttttagattttataagttgttttgtataattttagtttattaatgtggttttattattataaatttgtttatttagtttgtaattaaatttatttttaatttataagaaattattttatggttagaagtatataatatatgataggatatatataaattttaaaatttgtttagaattaataaaatttagaagttatataagaaaaaaatagaatttaaatgtttatttaaaaatttttataggatatatataaatttgtttagaattaataaaatttagaagttatataagaaaaaaatagaatttaaatgtttatttaaaaatttttgtttatttttaatttgaattttatgaagtggtagtgattaaagtaaatattaattgttttttatttaaatttttaaaaatttaaagagaaacggttaaaaatagttaatatattattgaggttaataaataaattttatatttaaatagagatgtttttaaaaatgagtaatattttaagaaaaattaatgtatttttaggtttttacgaaagtgagaatatggagatagaaagttagagatttcgtattgttcgtatttaatttttatttcgtttgttggattcgaaattttttttagattttataattttgattgttaaaaaatggtaaaaatgaagtttggaataataggaattatttaagtaatttaaaaaaaaaaaaaaaagtataatgaaaaagagcggaatttgaggttgaatttttagattaaacggttttattggttgcgagtagttgttaaattttttatttgattttatttatttagtttttataattaagaaaagtggacgtggttgtgttgttttgttttgttttgtttaagttatttatttttttttaagatatttgttttaggattatttggtagtatatttttgtatattttttatacggggtaaattttatatgtattttatattaatcgattaattattaagtagataattaaataatagggattttttaattggtggtgatagaaattttaggaggtatgtgagatttatttttttaggtggcggttttttttttagaagaaaattttttggttttcgggttatgttaatttttttcgtacgggtttagttttagcgtacgggtttagcgaatatttaaataaaatttttttaataaaaagtattttttttttagatagtttttttatagattaataaatatattttgtgttgattaatgagagttatttaattttgtttaaaaggttgaaggataattttgttgttttattttttaaaatgtttttggttagtaaattgggggttttgatttgtttttggtatatagttttgcgttcgaaattattttgtttttcggaaagtttttttttgttttgtaaatataagaaatattattaataatgttttgaaagaaaatgggggcgagaagggggaaggacgggatgttcgtaaattttttagaaatttttttttttttaaatgtattgaatttttttatttcgtgtgaaaaataattataaacgaattaatattagtattttttaattttagggtaaggagttggaattttagttggtgagttggattttttgtttttcgtagtatagttattttagattttaattattttagatatacgtagatttatggttagaagtgaggggatatttcggagggaagtgaaaaagtgaaattttttttaggggggtattcgattttaagagatggttgtagttaggttgggttttgggagtttatttgtcggatagaaggtgtttaaggtttgttgtgaagtagtgaggtcgggcggatttttttttgtggtagggtaggtagggtggggtgataggggaatgaagagatgagggttttttgggttcggttgtaaattttaaatttgcgttttgcggatatttattttcgtttttgtagttatttattttattagttggtgggattttgggtttttttacgttcgcgttttatttagtatatgttatagagaacgcgtgggaacgtagggtaggcgatgatttatgcgggacgcgggaggagattaagtttaggattaggtgtttatggcgtttagcgcgtttttttgggttttcgagaggttttttagtggggttattgtttttagtgtgtttggcgatttattttttagttttttttcgttaaaaagtaaaattgaaagttttttttggttttgagtttgggaggaggttttgtgaagtttcgttcgttgaattttttttgtttaggcgtatatggaaataaatataaaatcgaaggtttaagagcgtttttcggaaagaaagttttggtttttttcgtagttggagtttttcgatgggaagtagtagagattttttttttgtttttaggtagtttgtagggatagtagtttcggattgatgattttgggttgtaggtatttaattttttatgtattttgtgttttatttataaaatgagtgttttagatattttaaacgtttaggtgatagttgaagtatcgagcgtatgcgtgttgcgtggttttttttttttattattattagtatagtagtgacgagtttggagttgtacgtcgtgttgtggattaattattttttttttaagttttcgtttttaatattacgaaaatgtattttaaaatgtaaaaaaataaaaatattgattttttcgcgatgttttaaatgggtttaaatatttttaaggtttttttgtttgttttttaagataaaaatattttttaagttttttagagatgtttgttttttttttttcgattttgttcgttagtgtaagtagaaaagcgtttttattattttttttagggagtgttaggtatcgtaaggttttgggcgcggggggtgtggacggtcgtttcgtttttttttaatttttttatttttattgtggtttgagacgttcgggtcgggcgggtacgtatttcggtggtttgttgttttcggagcgttatttgggcggttatgacgcgttgtcgttttattattagtaggtagttggcgtattggtagtcgcgttagcgatagaagcgtttgtggttttttaggtaggatattacgtcgtggttgcggtagcgcgcgtatttgggcgtgcggtttagtttgcgcggtttcgcgtcgtcgttcgcgggagtgtagcgttttcggggatcggtgtcggcgggtgaggtttgaggcgcgagcggcggtttcggttgcggtttttttcgttgtttcggttggtcgggtatttcgggggacgcgtttgttttttcgtcgtcgtttttttttttcgcgttttcgtttatttcgtcgttattttcgtcgttttcgtagttttcgttcgtcggcggcgggttgggttcggggggcgtggatcgcggcgtttcgtagacgtttttttttagttttaggttttcgatatcgattttttagttttcggtcgcggagttagtttgcgggtcggttatggcgttcggggtttcgttggggtttgagtttggcggtttttattttggggaaatataaagaaatttaaagatttatcggtcgtcgttagggattatttttgagttttcggtttaaagtttttggtttgttcgttttcggtcgtttgagttattttgtttttattatatgttttttatttttaggttatacgtgttttttttgtatttttagggtttttagggatttataatttaataaaggttttattttattaattttaagtgttttgtgagtatttgatttttaatcgtggttttttttggttttatacgggtttttcggataagtttttgggtaatttatttattatatatatataaaatattgtgtttaaataggtagttttaggttatttgtcggatttttttatatttaattagtatggttatgatgtatataaaattattcgtggaagaatagtttttttttgattataagtggttttttagatttattgaagtattattttatgttttttaaatgttttttattagtttatattattataaggatttttttttgggtttgaagaggtttttttatttttttttttaaaatatttaattgaaaattaaaattttgttgttattagcgttttataagggtaaagagtataatatagacgttcgtttagttttaatagtatttgaggtgtatagggttgagtcgcgtgggttttttgtatttaggttttggtttatatatttaaggtaaggtatttaagttatatagaaaaggtgaaagatgatttacgttttttgttttttttgatatttcgagcggtattatagtatttattaaaattttgaggttcgggttggtagtttagttaaaagatatttagttttaggatttggcgttagggttgttggttgtgtatgtaaatagaaatcggggtcgttatttttaaatacgagatcgggagttgatagttggaggttcggaacgaatttattggatggtggagggggagggagaaggtaggtggagggaaggagggaggaagttagttaagtttttagcgatttagtttagtatatttcgaattttgtaaagttttgttcggttttttgtagtttcgggcgttttattttgttgaggtcgttttcggttttttttgatttaggttgggcgggaaaggtcgggtcgttttcgtttggtttagatcgttggtttattcggcgggcgcgcgtagttgtatttagcgtagcgttattggt

SEQ ID NO: 107 - DNA, 42929 bp, Artificial Sequence
  chemically treated genomic DNA (Homo sapiens)
tattaataggagttgtagtttggaagataaagagtttttggtatcgtaagttttgttatttgtgagtgtggtatagtgaaggtttggagagttatgatttaggttttgtgaagttaagtatttttattaagtaaaaagattggtaataaaatatttttatatagtatatgatagaatatttgtatttattttattttattggatattaattgtattaattgaggtatatgtatttttaaaaaaatgaaagaagaaaatatttagagaaaggattggtatgaggttgaggaagaaaaatgtgtattgtattttttagatgaagtagaaatcgattagtaatttaaagtcgtaatttatttaattttttaatattgtaaattaatttttatttggtttgattgtttgattgaaatgtaattttcgtgttggtttttagaaatttaaaaatatagagattagaaatttggttgatgaaaatttacgggaaaaaaaagtatgtggtttcggtttgaaatgtagaatggataaataaaatgtttatagtgtaatattttaattgaataatttatagtaatagttgaaataaagtgatatattagattatatttgttataatataaaattttataataagattatgaaagtgatttttattattttggtaatggtgttttagtataagtaatgagatataatttttttttaatttggtatattaaatagtaaaggttatatataaatgttgtttttttagaatgtattttgtttataattatgtattgtagttattatgtatatattaaaagtatttatgataaagtataaaaataagaaaagattaaataagaaggtatttttgagttataaatgtttattaaagtatattttttaattatatagttgtgttatagttaaaaatatataaattaatatatattgttatgtaattatttgatttaatatagatttattaggaaaatattaaggttgtagtaatattttataggtaaaggttaagttttgggatatgaaagtttttagaaaatttataaaataaatttgagatatttttttgttttggaaaaaagtaatttgtttatagagttaaagttttgatatataaatgaagtatttaataaatattatattttattgtaataatttggagtaaaatttttgattttaatggttgttagtaaatatatttttttttcggtagaaatataatgagggtttttgattaaagtagtaatttgattattttagtttttaaatttagttatttttattcgttttttgttttttttttttttttttaattaggttataagtatattaaataagttaggtaaattttaagtattttatttttttttatataaatatagttttttttttgtcgtaagtatttgatgacgattgggtttatatacgtaaaaatagattatagtatatttggatttggttgatataatgaggtatttagattggtttatgattatttttgtagttatatattttttaatttaaaaaaataggttatagtagtttaaatttattgttttagttttggtggggtataatattttggaatggtaagtgttaaaaaatttaaatgtattgggtaagtttgttttgtgtagttgattttaatgtttttaaaaatattggtatgattttttatatttaagaagtatagttatgaaattttaaaataaaattatatgaagttttttaatattttaaattataaaatagatttgttatgttgtagatttttttaatagtttatttgagatttaattttgttacgttaaatattttttttttaaatgtttatgttttgaattttgtgttttaaattaattaatttagaatgagtgggaaaatgtttaattatttttttttttttttagtgtttttttttttttttttattatttttttattttatatatatatatatataattattaaaaatttttttttttaaaattttggtataaagattttaaaaagtttaataaaatgtaataagtatttagtatttaggatattgtagaattttttttggaagtttaattgtaatgaattttaaaatttgaaattttaatttatttttttaaatgtgaatgtatatattttatttgagttttatgtttttttagttattaaagtaattgttattttaaaaaatataattgattttatttttattgttttttttaaatagtttttaagattattttttgattttgattttttaaaaagtaggtattaatgttaatttttaaaaaattatttagaagagaaatttggttagttgtaatgggagttttgtttttaatttttgttatttcgtaaaaagaatatttaggtaatttatggtattttttattatttattgggtagatatagtttagatttttttgttttttataggagaatgtttagatttttattaattttaattggaatttaataattagaatggttttaaaatttagttaaaatttaagtatgttatgaatttggaattttaatatattaattaggttatttttaaaataagattttgtattataaatagaattttaataaagatgttataaaaataagaatatattttaggatttaattttgagattcgttaaaatttgagtgaagaaaagaaattttgttttatttttatgttaaaaataggtggttgatttaattaagtttatttttagtatatttggttgcgttagttgtattttttaatttttaatattatataaggtatatattatttaatttttttttgaataagataatattaatatattgtttacggatagttaagtaatatattttatattatttggtgatttttttttttaatttatgagatttattgaaattagtatattatggttatataatttaaagtttggttggtttttttttttttttttgttgataatttaaattttgtattttggtaagtaaaagaggtataatattattttggagttttataatttaataatgtatattttaaaatttatgataatttatggaattttattatatttattaatttaattattgatttttttttgagtaattgattttatgatttatttttaaaagtaaggaagtatattagaaggtaaaaggataaatttatttataaatattagagtttaagttatttttttgaaaaggtgaaaagggaatttttggtttttatttttttttttattatttttaattatatattttatattgaaattatttgtttttgtttttttaataatatattttgaaattttgtttaatatattttttgtttatttttgtatatgggagattaattttggatttttattaaaaatggtttggttattaaaatattgttttatttagtagtttggtgtaagtgtttgggtgtatgtgtttatatgtgtattttaattttaaagaatgttatttttagaaataattaagatgtagtatgtatataataatttattgggttttttaagtttttgatttaaaaaaattttttagaagtttttgtatagtttattatttatgaagaatcgttgggtatggagtatattttatttgatggatagttgatttatgtttattttaaacgttaattgagaagtagtataaaagaggaattggaaaaaaattgaattttattttttattttcgaagatgtgaatatttttaaaattttagtttgttttttgttttttattggtaagtttttttggtttgtaaattttggatagtattattaaggagttttatggattttttgagagtgatattgattttaaatgatttgggtttaatggttagattataattgaaatttattttcgtaggtttatttgggttggttttgaaatcgtattggtgagttaggatggagatgaagagaaaaagttgtattttagaaagtttttcgttaatgtatcgttttttgtttattgaaaaaattattattttgttggttaggtttttgttgatgaggttatttttgtttaagaatcgagttggattaaagtttttcgggttaggttattttattgggttatgatttatagattattggttgataaaaattatagtgtttttgggaatgtggtagtttaagatagaggtgttggtagtggtggtatgaggaatagtgataggtataaagttggagaagcgtatggttttataaaggaaggttaggatatagggtaggttgggttggttatttatataaggtagacggtttttttttacgatttgatttaattttgtttgtattcgagtttgtatattaggatatttgtttggtgtttaatgtggagagagaaaagtaagtgagtaaaatttttattttatttagaaagtatattataatttattttaattttatttttttttaaataggttatttagtttagtgattaaattaatatttttgggaaaaaaatttaaaatagttttttaattttttattaaattataagatggattttaagaattatattttttgtaataggttttgtatgattaatgttgttttttttattataagttaaaaaatttttaagtttttttagttttaaaaagtataatagtagataaggttgatttttttattgggtatcgtagggatagtgtttagggtttataatattttttaggggtttatgaaaatatttttacgttttttataatttttagatttaaaaaaatttatttttagttagaagaaaatatttttatatattattttaatgtatttatttttatattagggtagttatgaaatttaatttttaatttttttatagtataaggaatttataaaggtaaaagtatttagggtttacgaaagttataatgtgaaagtaaatttttttttttttttatttttttggataattttaatagatatgttgtttttattttatataaagataattggtgttttgatggataaagttatatattgtattttttaaatttgaaagtaaatatttaatgtttataaaattatggtataaattgtagtatttatttattgttgatgatataaattgatataatttttttaaaaaataaaattttaatacgaggtaagagatatgaaggtaattttttttcgttttattttaaatttagtaatttatgtttagaaatgtatttttagaaaataatttaagagatataaaaatatgtaattataataggatttaaaattttaaaaattagttaggtatggtggtatacgtttgtagttttagttatttgttagatagcggcgggagaattgtttgagtttaggagtttgggattagtttgggtaaggtagtgagattttgtttttaaggtaagtaaatatataaaattaaaataaaaattttaaaaatgtaattaaggttaatgattaatattaaagtttaataaatgattatatataattatatattattatagtaaaatattatatagttattaaaaattattaaaataaatattaaaagattagaaatgtttattattttgagttaaagtgttagaagttaaaaaataagtaattgattgtttgtaatttcgaaaaaaaatgtatatacgtatgtgatgaagtggagttatttttagaatcgtttttttaatattatattgtaggagtttgttaattttttttatagaaatatgtatggtggggagagttagagagtatttattttagattttgtggattaaattttttttgttgtattattttgttttgttttgtgttgtagagtgaacgtagttatcgataatgtataaatgaatgggtatgattgcgttaataaaacgtatatataaaaatagatcgtgtaatttgttaagttttgttatacgtttttttattaaaaaggaaaaaaaaagtattagtatattgaattgaaagtgatttttaaattgttttatttttttttgtcgtttaattggagtattcggagaattattgtggttttaatgaaaaataaaggtcgttttaaaagttaaaatgtttatttgcggatgtataaaaatttatggaatttatttcgggatttttttttttttgatttttggttgatttttttttattcgatttttgttttttttttatttattatgggtgtttttatgattttaatattaaaaagttattttaagtatatagaaatttttaatttgtgaaggtagttgtatagtatttaaggaaatatagattgtagtggattttaataaggaaagagttattttttgttttttaaatatttttttgtggcgtttgtagatttagtatttttaattgtttatttgtgttttaagaaatgatataaaattaggatttttggttttttcggtaattaaaatttgttttgcgaaatatttgtttttagggatagtgtttttatagtaaatattataggtcgtttagttaaatatggattttagattaataagggttaattttttagtgtgagtattttcgtgtaaaatttattttttttttgttaaatttggtaattcgatattagggatttgttgaattcgtgtttagtagagattaacgtgggtattagggggttcgttaattgagttaagcgtaggggttagaaacgtttgtaggcgttttttggatattttatttgtttttttgaatgttattttgttttcgtaaaagtgattgttttttgttttttatttcggtattttttaaatttttagcgcggaggttttataaatttagcgttgttcgttagttgtggtcgttttttgaaagtttttgtgcgggttatttgtcggttggttcggtttttatgggtttttttggtttggaataaagttttgacgggcggttcgtttttagcgttagggttgggcggtttcggatgtacgtcgaggattagtttaggagaggttgttgtgtttaatatatttatgatattattttttttttcggaattattttagttttgattgtaatgcgttagggagagagatattagggtttatttttaagtatttaaaaatttttgttttttcggggggtggaggggtttttgtaaatgtgtttttattcgtaagtaggggaggggacgatagagataagataggagatcggaggggtcggggtatcgttgggtggggcgcgtgcgcgtgtcgtagtttttattgtgagtttttttatcgacgcgattttggttttgaggggtggggatttggagcgaaattttaaattcggggttttgtttgtaaatttagtatattttgtttttatttcgttttttttagaggagaaaagatttggtttacgttttttagaggttttatttggtgaagaggaggagtagttattgtagcgcggtggatagggtgttttggttggcgtcgaagatgttagtgatagtggtcggtacgttttttaaatttagtcgcgcgttattatcgtgcgagttttcggtcgttttttttttcgtagagaggataaaggcgtttattatgtcgcggggggcggtttcgggtcgaaggttttcgtagtgttttaagaatttgtttaggatgaagttgttgaagttgcggttgagttgttcgaattcgcggaaaacggtgcgtatcgggttggggaagtattgtagttagggtattacgtttattaggttgttcgcgtttatcgtgcgttcgaatttttcgttgtggttgagtagtttacggaattcggggtcgtcgtggttgtagcggtagtcgaaatatacggtatttatgacgttggttacggttacgacggttagcggtttcgggtcgaggaaggcgtcgttcgcgttgtcgcgtattagtagcgttattagttcgcgcgtttcgtttagtacgtggttttcgaggatttggcggttgcgcggttggcgcgtgaagaagttgcgtattatgttgtgggttgcgcgtcgttgtattttttagtgtttcgagtagtggtcgaaagttatgttgcggtcgtcggatattatacggaaggaggcgaaggtcggtcggtcggcgaaggtcgagttttgttgtattagggtttggtggatggcgcgttcgttatttagtattattatggggtagttgtttaggcggatttggaaaacgtcgtcgtagcgtcgcgttaggcgagcgaacgagaggtgagtcgtttggtttatcgtcgtcgcgttttcgattagtggttacgtaaacgggttcgggggcgcggatcggagttgtcgttttcgttgttttagtagtcgttggtttatatgtatagtggttagtatcgataggagtagtaggagcgtggtttgttggatggatagcgggtttagcggttaagggtcgttcgggttgaggttggtgtttatgttggggatagagaggagaaggcgtgatatttaggggtgtagagataggagcgggcgttttacgtttttattttagtttttggggattgagtgtcgttgggtggagaggtcggagttgattttttggagaaatggtcgaagacgtttttttttatttttaatttatttttttttggagaagagaaggggcgtgtttttatttcgttgtaatttagcgttaaatttttttttttttcgtaaggcgcgtaacggtttttgtaatttggggataacgttgcgggtatcgaggcggtggcgtttgattttttttaaagtatttattacgttattcgttatttgtaataatttatttgaagaggtcgtcgggtagcgtttcggtagatagattgatttgcggggaggtgcggtttttagtggcgcgggatagtcggtttcgagaaggaattgggatttttgtttagggtaagacgttaataggaattcgtagttcggtttggatatttgttgtttttattggaagttttaatttttattcgagttttttggcgtcgttagtgttaggagcgtttggattgggatggggacggagaagggtgtttcgttcgtcgagtttcgttgtttttggggatttggtaaagtcgaggtttttttatagcgttgagattgagattgggggtcggtgagtggcgttaatttttatgtttttgcggtttttataattggagtcgtagaagcgttcgtttttatttttattttagagttaaagcgcgttatttcgttttttcgggttttaaggattgggtagaaggagggtagcgcgatttggtagggcggggtttgcggggggcggggcgcgtcgtatattaggtcgttttgattcggattttcgtttaggcgtatcggtcggtttcggagttttattagtaggtttttatgggagcggaggtgtttacgtttttattgtgcggtaatcgcgttttattatagttatttttaatcgaggtcgtacggtgtttttagaattacgttcggtataatttgtttcggtcgttgcgttcgatttgggagcgcgtttcgtttcgagcgtacgatttttttttttttttcgcgatttgagtttgtttttcggaaagttagtgtagtggtagcggtttgttttatagcgtttttggttggttgtttaaattttattttaggttttcgtaaataaattgttattttagtggaggttttttggtatgttaaattttttttagtttttgcggcgagattaggaatttttaaaagtagtcgttttttcgtttcggggtttcgatagtgtttgggtatataaaggtttttggggcgtagttggttttgagatttttcgcgtagaggttattttaggtggcgtcgttcgttggtgggcgcggggtcgtttaggttgcgatggaagtcgttggcgtagggcggggagttaagttggggcgattgggggggtttgggggagttagcggggcgggattcgagcggggcggagagtggtaggaggaggcgaattttcgcgtttcggcgaattttatcgggttgaagtttttgttgtcgttttttttttgcgtgcggagttgggttttgcgtgcgtcgtttttggaaagtcggttttagttatatttttgggcgttgtttgcggtcgtttttttcgcgttttttacggtatttgatacgcggaggcggcggtcgagggtggggtgtcggttattattatttttggcgtggggtgtcggtcgttattattttcggttgcgtacgtatagtcgcgtttgttaggttagcgaggcggacgtttgggttattattcgtaggtcgagttcgggcgcgtatcgttatttcgttgcgtatcggcggttttgtggtttttttgggcgcgtttgcggtcgcgaagggggttttttttttataagggaagtcggaggcgtttgggcgggggtggtttttttcgtttggcgcgtttttttttatatgttgatgtataggatttttaagatagttaagagaataaggattttacgaggcggggggaagggcgaattcgagggaagaggtgggatgtatttggttaattaggtaggaattgtattggttttattaaaggataaatataaaagtgataggtttattagggataattttgtattttgagttttattcgcgttgcgaatttcgtgttattattgatttgtttatagatgaataaattagggtttagagaggttgcgtgatttaatttaggtcgcgtagttattaagaagtggagttagggtttgaagttattaagttttattttagattttttatataagtttatacggaagaaaattgtagataagaggtttaaatgtttttttttttgttttttttaaaaaaaaaaatgtacgtggggttaggcgtagtggtttacgtttgtaattttagtattttgggaggtttaagcgggcggattatttgaggttaggagttcgagattagtttggttaatatggcgaaattttatttattaaaaatataaaagttagtcggacgtggtggtgtatatttgtaattttagttattcggggattaggggggaaggtagtagaattggttgaacgtgggaggtagaggttgtagtgagtagagattgtattattgtattatagtttgggtagtagagtttaagtgagattttgttttaaaaaaaaaaaaaaaaaaaaaattagttggaagaattttttaattattgtttttgtttttataattgagaattttgagaatagtagagaagaaatagtatgttaattttttgtaattaaattgtttatgagggaggttaggggagtgtgttttatagttgattttggaatgattgattatattgtaaagaaatataaaggagtgtttgaaaagaatttgattttttgagagattgaaattagtaattaatttgttgatttgataaagaaatgttttttcgtgatggttttttttatttttatttttatttatttattttttttgagatggagttttattttgttatttgggttgtagtgtaatggcgtgatttcggtttattgtaattttcgtttgttaggtttttttggtttagttttttaagtagttgggattataggtgcgtattattatattcggttaatttttgtatttttttagtagagatggggttttattatgttggttaggttggttttaaatttttgattttaggtgatttattagtttgggttttttaaagtgttgggattataggtatgagttatcgtgttcggtttgtgatgttttttattcggtattttttgaagagttttttggaaatgattttatatattatgatggggaatttagatagtgatggagttttagtttttgagtagttgtattggtttaataataagcgttggttttttagaggtgagttggtttatatagtttttgaaatgagttttatagtaatttttttatgtttagttttagtaagatttttgtttaataatttaagattttggtgtatgtattaattttttatagattttaatttagtagacgggaattatttatgagttaatgttaattttgagttgttgatatttttgaaagtttttattataatatttttgttagaatgagagtagatggaagttgtttttaagtaaatttttatttttaaaaagtataaaacgaggttgtttttaagatcgtttgtttaattttttaataatgttatttagtttttagattaattagatgtatgtttttttgttatcgtagatagattagatatattttttaagttgtagttttttgggtttagttttttttttaggatatgatttaaaaattagaggaattaggttggtaagtgttgttagaaagataagtttttatcggttatggtaaattaaaatgattggttatggtaatattttttgtagagaatttttaagtttggagtttttagggttttatggtgtaaattttattgaatgttttattcggtattttgataaggatttcggataaatttagagtagtttgttggtatttcgatttaatttaaggtagagttttgtttttagtgagaatttacgtaggttttttaattattattataattttttaattaaagtagggatttaaggtttaggaatttttttttaattaatatagaatatgggtattttgtttttttaaattttaaatttgaattgtttgttgtaaataatttttaaaaagaatagttaagttagagggatagtttaaagtagagagaggtttaaaatattttattttgtattgattcgaaggaataatttaagtttgtttaagtagaataggaatgtattggtttatgtgtagagaaggataatcgtgatgttttataggatataaggatttaggtcgttttatcggttttttgtttatgttggtttttgtttgggttttttttttttgtatggtaaggaagtagtttaaaattaataaaataaagagaaagagaatagtttttttttagggttttagaaggattttagggggttaggttggtattaggtttttattttgtgggtaagggtttgttttgttattagaaaaaaagagatggtagaatatgttaggaagttaaagagttgatttagtttattttatgtatatatgtttgtttattggtttttttgggttggaggataatttaaggaaatttaaagttattattgttattattattttaaattagtagatatatgtattgtttttagagttagtagtttagaaagttttgtttttttgttgttaggttggaatttagttttttttatggtttttttttttagtgtgatttttaagttagtttaatgggtagttattgtgtttttttagttatttttaaatatatatatttatatgtattgaggagagtggaggagaataagttatttttggtaggtttttgatatttgggtgggtaggatttagttattaggtatatgttggtaggtaagaggagtagaaataaggagatatattaagtggttgagggtgcgatagagggaggaattgtaggataatgtatattaggggttggattatgaaaggaattttaggaattgatattaaaattttgtgttttatttgaaatgttttatttttttttttttggtaatatataggtagagaattatagagttaatagaaaggtattttatttaattttagaagttattatttgtaggatgtatttttatttttatgtattaatataaagaaaggaagttattaattataattgtattatcgattttaagatatatttagatttcggagatgtaaaatggaaagttgagggtatgatttggagttgataaagtattatatattttatgcgcgttcgtgtgaagagattattaaataggttttgtgtgagtaataaagtttttaattatttgggtgtaggtgggttgagtttgaaaagaaagttagttaagggagataggggtggggcggttttataggatttgggaaggtaaaggaaaaaggggggttgttttttggcgggtaggagtgggggttataaggtatttaatgggggagtttttgagttaggatgagttaggagaaggaattttataagaaaatgttattagttaaggtaggaataggttatttttattttttttgtggtggaatgttattagttaaggtaggaatcggcgatttggatgtgtacgtgtaggttataggggatatgatggttttgtttgggtttagagggttgatatttttgtttttttatattaataagaaaaataaaattaaatagtggtaaagttttgggatagcgaaaatttttgggggtggtatggagagataatgggcgatgttttttagggttgttttagcgggattaggggcggtgtgggaatttagagtgggagagattaagttgaaggaagattttgtggtaaggggtgatattgtggggttgttagaaggaatatttgttatttagaattattggtgatggtttggatatagttttgtatgaattgaaaaattaaatggaataagagaaggagaaaaataggtataaaaggtttaagaattgggataatttaggatatttgattagagagtgtttaaggagatttagtatagttttgttagtaaagattatttatttattttaagagttaagagtggtagtttggggatagtattaggagatattagttgtgatggtttggagaaatagcgtaaatcggtagtgtaaataagagtagggcgtgtatgagtagttgagaacggtgaataggagtatgattagatagaagataatagggatgataagtttttttggggtatagtttaagttggtttggtgtttggaatgagattggggtttaataaaaaggagcgtttatataggagtttaaatgggttgtattttgtagtattttgaggataggtttgatttttgagaaaggaaagtcgtaaaagtattgtttagttttttttaagttggtagttgagtttggtgaggtgtgtttttaaaagatttttagttcgttttattttttttgaagacggaggattataagggatataaagattttattgaatattaagagtttgaaaaattgtttggttgatttgattaataaaggttggtttgttattagattgtatagaggtgggaaggttaaattgaggaattatgtttgatagaagggaagaaatgattgcggtggtttttttagattttataggaaaggtttttatttatttagtgaaagtgtttatttagattaagaggtattttagttttttgatttgggatatgttgagtaaagttaatttgttagttttgggtgggggtaaatttttaagtttgatgtgtagggaaggaaggggtttgaataatttttgaggagtagtagaatagtagatggaatattgagaagttatttttttgaggatagatttttatgatagaaaggaaatgagaggttttaagaggcgggttagtggtttgtattatagtatagtttgtttttgttggtgtgtggcgattaggtttggtggaattgttattaataaattaagcgtgattagggtgaggaataggaaagaaggaaatatggggaaatggggtgaatgttaggtggattagagagatatagttatgggggttaggtgtggtattaggaataatgtgggaggtcggattgaagttcgggttaggaataatagtaattgtgggatttaataaagattgagtatagttgaaggagtcggggagtagaaagtatatgcgttaggtgtgaggaagaaaatagattttggaagttatgagaaatgtagagagtgagttgagtatagtttgtgatttttagggtttttaaaagtattagggcggtagtagtcgttgtatggagatatgagggttaggttaaaatagtaaggttaagttgtttgtataggaaggttatagggtgcggttttggtttttgtgtaagaattttgatcgtattaattatgtttaggaaggaaaggcgttgttgttttgtaagggattgaggtttgggagattaatcggatacgattagtagggaaagtacgtgtgtttttatgagaattatgttgagataggtaatagatgaggatgaaatttgggtttgattgaagtaatgggggttgtttgtgaagttttgcggtagtatagtttaggtaatttgttgagtttaatgggtgttagggttagtttaagtgaaagtaaagagaggttgggatgacgggtttaaaggaatagtaaagaaagtatgtttgagatttaaaatagaataatggattgtggagggaggtattgaggataggagagtatatgggtttggtattatggggtggataggtaaaataatttggttgataaggtatagattttgaattaatttgtaaggtttgtttggttttaggataggtaaaatgggggaatggtaaggagagtttataggttttaaaaggttatgttgtagtaggtaagtgataataggttttaatttttttaaagtatgttgtgggatgggatattggtattaatcggggtaaaggtggttaggttttaatgagatggtaagggatgtatgatcggttattaaggagggagtagaggtattttatatttgtgggttaaggtgggggaatataagaggaggacgtaaaggaggttttggattgggaagaagggtagtaatgagatgtagttgtaatttaggaatagttagggaagtagataatttagttaaagtggttcgttttaataagggaattgggtaggtgtggataattaaaatgagtgtttaaaagagtattgtttaagttgttattagagttggggagttttaagaggtttagaagtttggttgttaatatttataatagttatggaggtaagggaaataggtttttgaaaagaaggtaatgtagagtgggtagttttcgtattgattaagaaggggacggatttattttttattgtgagagttacgcgaagttcggcgtttgtgatggtttagggggtttttaaggtagtcgggtagtattagtttttagtcgttaagttaagaagatttgggaagtagttagagagttttgggttagagttttaggggttttgggagtggttgttaggtgagttggatagttcgatttttagtggggttttatatagatgggatatggtttaggaggaattttgggttgtaggtattttttggtttggtggttagatttttagtatttgtagtaagtttttaggggaggaggttttggaggaacgtttggtcgttgcggtttaggcgtttggaagtttttgtgtgttggagatgtggttggggtttgttttatagtggaggtaaggaattgtaatttttttttattattgtatattttgaaggcgaggttaattaaattttgttgtggggtttgagtgttagattttaatttttggagttttatttaatgtcgggagtagattgggtaataaaatgtatattgagaataagacggttttttgattttttagggtttagggttgtaaagcgttttagggttgttgttaaaggagttacgaattgggttgggtttttatgtttgatgaaaacgttatttgatttgggataaagaaaaaggagtattaattttgattgtgtttttagttttagttatttttttaagagttaattgttgggtaggtgggggagggttagttacgaaacgaaattgtaaggtagattaggtgtgaggaggggaggtgataaaaggattatagggtggaggagcggaggttgaggaagaattgggatttagttgggtttggcgaggagtagtttggggaggtggggagaggttagatgggttcgtagaaaaggaagattagaaagttttagcgacgtttggggttgggattgaggggataggtgggagggaaagaaggaagatttgggatgagttgtattgggaatagagattagagagggatcgatgtgtaaaagaatgtttggatgttaggtattttagattatttgtttattttataataagaattatttagattttgtaggatggaaaaattgaaagtgtcgtttttcggttatttggaattattgttgagtttgtattggggttaagcggtattgtagaagaaaataagatgtttagattttaatttaggtgagagttgaagaggttttaagtttttgaggatataggttaagggagaagaaggaggaatggagggtggaaagttgtttatagtgaaggaagtaagtttagagaaaagagagagtagagatatggagggaaggggtttgggggtttttattttttagaaaagcgggaaaggggttggggtacggagaagaggttggggtacggaaataagggatgggggtatagagattagaggttggggtgtggaaataagggattggggtatagagatataagaggttggggcgcggaaataagagattgggcgtagagataagaggtcggggtacggaaataagggattggggtgtagagatacgaggttggggtatttgttttttttttagaaaagtaggatttgtcgtttagggtgaaggagaaggggttggggattttttgttttttagaaaggaggagaaggggtagagatacggagagaaggggttggggtatttgttttttttttagaaaagtaggatttgtcgttaagggtgaaggattaaggtaggcgtttttgtatggtttgatatttttgaaatttgggtgaataattattgtagtttttgtaatgattaaatattaagggaaggttgtttttttagtttttgatcggcgtcggagttttgggtttacggataaaacgtgttttttttgtttttattagaaaatgaaaggaattgaaattaagagaagggagagattgaagagtggaaaggagaaagtggttgaaggatagtgagagaggttggagaagagagtaagaagaggtcgtttattcgatttaaaattggtgagatgttttttgggttggtcggtttgaggatttgaggtcgtaggtggattttttttatggagtaaagaataggaggataggggattgtttttttaagggaggtttttcgattcgatttatggtattaaattttatgtatgttcgtgtgaagagattattaaataggttttgtgtgagtaataaagtttttaattatttgggtgtaggcgggttgagtttaaaaagagagttagttaagggagataggtggggtcgttttatatgatttgggtaggtaaaggaaaaaggggggttgttttttggtaggtaggagtgggagttataaggtatttagtgggggagtttttgagttaggatgagttaggagaaggaattttataagataatgttattagttaaggtaggaataggttatttttattttttttgtggtggaatgttattagttaaggtaggaatcggcgatttggatgtgtgcgtgtaggttataggggatatgatggtttagtttgggtttaggggtttaataatataggttgataaggattttttttttgtattaagtattttttagattttttggagtggttagtattaagggtattggttattaatttttatttttattaatattattttatgtagataaatgtagataattgatgtttttttaattttatgtaaagttggtgagaaggtgatttagaagattttgttatttttattgatttaaattaatttaagaaaagatagttatttgttaagtagttgtagtttaaaataagttttttatttttgttttttttttaatttcgttgtttatgagttttgtttggtattagtgaaagtgatagaaatatatgtagtgaaagttatatgtattttagttttttattaaaatgtatatttagaggtaaaggggtgtaatgtttgttatttatttttaaatggtttaaggaaaaaatagaggggtttggggagaaggagagggagagagaggagaatgagaaagtaagtgtggttaatgttaattggagaatttgggtaaatgggagttttttgtgattttttgaaatttttttgtaattatattaaaattaaaagttaaatataagaatataaaaaaagatttttttaatattttgattttatattgtttttttagttttttttgagggttttttgtaagtaaggatagtggaaagaaagtgggattagtttgttgtttagggttttgtatttgatgtgttatttttggagtttaggattaataaaaagtttgtgtttaattgtagtttttttttttagtattatggattataatttgtattttttgtgtcgtttttgttttttgaatggtttgagtgtgttttgttttttttattttaggttttttttaattttttttgaaagtagaagaaatatgatataaggtagtgttatgtttttagttttattgtgtttttgtgttaaggggtataatttatttagggttttatgtgttttataaatgtagtaaatggtgttgtgttttaatggttttttttagtattatttttagtttttttttttggtttgtttttttttgtttttttttttttttttgttttatttttttttttttttttttattttgttttttattttttttttttttgggtttatttttattttttttatttttatttttttaagatttttattttcgttttaggtgtttttttttttgttttgttgtttttttttttttttttatttttttttatatagaagagtaaagagttagggtagaggggaaaagagtgagggaaataagaagggggagtagagagatatagtaattaagaaaaagaaaaagaaaaaaatatttagttttggggttaaaagatagttacggtggttagttattttgtttgggtttttaattggtgtatttattttttttgtttaacgtttgagtatgtgtttttgttgtttaatatttgtggggtgaagtttttatcgatttggtatagtgatgattttatacgaagggaagggacgttagggtttgtggttgtttttgtacgtttgttttttgagtttttattattatttattttattttttgaaatagattttttttttttttttttttttttttttttttttttttttttttttagagttttgttttgttgtttaggttggagtgtagtggtattatttcgatttattgtagtttttatttgttatgtttaagcgatttatttgttttagtttttttagtagttgggattataggggtgtattattatgtttggttaatttttgtatttttagtaaaggtagggttttattatgttggttaggttggttttaaatttttgatattaggtgatttatttgtttcggttttttaaagtgttgggattataattatgagttattgcgtttagtttgaaattaatttttttaatagtgaaagagggagtttattgtttataattttggttaatagggaaatattttatttttttaattttttgattaattatagaaaatttttaggtagataaaggatattagtttttttttttatttttattttttaaaaataaatatttattaggttattaagaaaatatataaagtaataagtaaaatattttattattaaaagaatgtatatttgggtttagttaagattataatatttagttatggatatgttgattggtatagtttttaggtttttggatggttagtatttagattttagtttttttttttttttttgtttgtttgtttgtttgtttgtttgtttgtttgtttgtttttttttttttttttttttttttttttttttttttttttttttttttttttttttttttttttttttttttttttttttttttttttttttttttttttttttttttttttatttattttttagtttttagtattagatttgtatttttttataggtttttttttttttttataaatggattaaaatttcggttgaaaattttgggtgtatttagggtttgagaaaataattgatagttaaataatttaagtggttagtttttttttgtatgattttaacggagaatataaaggttggatagttatacgttagtttttttgattattgatttttaataggattttttttttttattattgaagtgattattttttaattgttgtttgttttattgttggattgttttggttagaaagttgtagatgttagaaggttttttttaatattaagaaaaattttggagtgaatttttttgttttttggtaaatttagagttattttttggagtgatataaagtaagatttatttttttttgttgttatatgtttgaagatggaattgtgttgtttttgagttatttttttattaattaaaaatgttttagttttttatttttgttttttggataatgtgtttttttagtatgtttatttgagtatgggtttgaaattgaatatagtattttaaatatgatattttgtttagtttaggggggtgtggttattttttattagatatagtgttatttttaatgtaaataaagtttttgttttgttttaatatatttgtattttattattaaaatatttatattttattaagattgtgataagtaaaaatttttattttttaatataggatttggtagttggttgagtttttagttgtatttgtattattgattttttaaaaaaatattatatgtgagattttatatttatttttattaaatgtattttgtggttttaggatggtgttttggtttatagaggttatgttgatatttttaggagtatagattaggataggataggaagattatttagggaaagtatggtttagtttggattatttttaggtaaaaatttttggattgcggtttatgttatatagttgtattattatatatttagaatattatgtatattaaattatttttttattttggttagatatttatttttaaaatatatatacgtagtaatatagatttttgttgtaagagagttaattagtatataaaaatatgtagaaaaatgagaataaaatgagaaaatttatatttttatttttttttagagtaattatgggtattatgtgttttttatttatgtatatgtatacggttgtatatatagatagatagatagatttattttatgattttaaattattgtatggtatgattatgatattattattgttattattattattattgagatagggttttgttttgttatttaggttggaatgtagtggtgtgattttggtttattgtaatttttattttttaggtttaagtaatttttttgttttaggtttttaagtagttgggattataggttcgtggtagtatgtttggttaatttttgagtattttttagaggtggggttttgttatgttgtttaggtttgtttcgaatttttggatttaagttatttttttattttagtttttaaagtgttgggattataggcgtgagttattgcgtttggttaatattatttttttaattattaacggcgatttagatggttatttgtgttgtttttaattttattattagagattttattgtagtgattttatttttttgtgtaattttgaatttatttgtaaatgtttttttagtatcgatttttaatagaaatgtttgagttatagggatatatgtatatatgttatatttttattgttttttaaaaaggtttgttaatttttatttttatgaattttggttttgtattaagtagaatgtatttaaatatttttttttttataaaggatggttattttgatttaggtttgttaatatggaataaaataaataaaataaaaattttatttgttttttagatttatttttttttttaaagaatatatatgtttgtgtttagattattttttttttttgataaatgagggaaatttttagatgaaagttgataaaatattagacgggggtgatttcggatttttatatttttatggaatatattatagaagttaggattggagagttaattttatatatttttatatttttttttagatgaatggtaattttttataggtcgtgggcgtaggtttaaatgttttttgggtttgtttaattttttagaggatattaaaggtaatatagttagtatatttaattattaggagtttggtttttgggatcgggtatttttgggtgtgagtattagtttttttatttataagttgtaattttggttatgttatttaatttttttgagtttgattttttttatttgtataagataggtaatatattaattatagagggtggttttgaggattaaatgagatattgattgtaagaaaataaatagtatagttgatggtagagtgagtatttaataatagttagttattattattattattattatttattaagtttttatttttgtttagtaaaatttaagatatggtaaggatttgaatttcgtaggaataaaaatatggtttatttggtttagcgtgatagtttttagggtggcgtgtcgttatttatttgtaaatttttaatagtttaaagtggtattagttattttttttttgcgttttttaggtagtatattgagtggttgttagtattattttagagttagattgaatttgaatttggtttttttatttatatcggagtgatttttatgttagaaatcgtttttttgggtttagtttatatttaagtgaatggagatgtaaaatggagacgatattagtatcgattatgtagagttgtggtgaggattgaatgaattaatatatgtaaagtttttagaagggtgtttggtatgtggtgggtgtttaggtattattagttgttattattattttgtgggaggttatttgtcgttgttttaagaaggttgattttatagaaatatttgttgttggtagaagagtttagtattaatagttaatttgtgtttttttttaatttttagatggtagttttgtagtattttttttttatttaatttttttttatttagacgcgttttatattaggatttttaggtagtatagagatagttttttaggtagggggatgttatgtttttaaaagagtttgatgaggttatagtaggttttttttattaagttatgttttcggttagtttttttgtgattgttacggatgttttgtagttttgtggtaatgaggttttaggataatatttatgtaattttttgttgaggagagtttagaaaattttatgttgtgtagtgtaattgggaggaaatttaagggagtgttgtcgtgggatttttcggtggtgatttgtataaatgacgtaacgttatttagttttttagaaaatatcgttttttttttttatattatagttttgagttaaagtgtattgtggttttagatttggggtatatagtttatttgatagttataatgagggaaatagtttatttttggagtttgtattagaaggtagaacgggagatttttagtttttttttattaaaggttagggaggaaattgtttcgaatgttttttagtttaaaatggaaagttagatttaatggtttgtatttttgggttgattaattttcgttttttttttttttattgtgttgagttagttacggggggtgggttgtgtattttaagggtttgaatgtagaaggaaggaaggttttttagtttttgagttttgagaaggtggtattgtggtttttaattagtagttatgtttttaggtattttatttttttatattattttagggattttttggtgtaataaggatgtgattgagttttgagtttttaggttattagttatattttagtggaatttcgggagttacggggtaaaatggaatttttttttatagtaagtgtatagaaggtatttagggttggtgggaatttttatttttgtttttatttattttggattttgaatttaatatttgaggttttttgtagtaaattagagaggtgaagagtaatttatacgtattttttttttttttttttttttttttgagatagggtttttttatgttgtttaggttggttttgaatttttgggtttaagggatttttttgttttagttttttgagtaatatatattatttaataaggaataaatattataataattttgagtattatagtcggagtattgtgttttgttaaatgtgaggagtattttttttgatgttattattataaggttagggtttgtggtttaagttttttcgtttttttagagttttttatattatataataagtttggagatagagaaagtagttaatatttttttttaagtgttaggtattgttttttattttttatattgatagttttatttattttttttaattattttaaaaatattggtatatttagtttgttttatatataaagggattaaggtttagagatagtaaattatttgttaaatgttatagaggttgtaagtgagaggggttaggatttgaatttaggtttgtaggtattaaagtttatttatattatattagtatatatttgttgatttattgcgtattattttaagttttatagaagttttatttttttaattatagtaattgtagaggtttttagtattgttatgtttattagggatttgggttattttattgtttttttttgttttgtgagttgattttttttaggagtttaagattataataagtaaagttattttgttgttagagtttgatgtaatttatatttttttttttttttttttttgtagaatatttttggtatttgtttagtaatttaatttttataatttataattaaattttgggatggtttagaaaatttttttttaatatagtggttggaatatgtagagagttggtatgtagtttttatatgggttttatgattagatttgttatatttaaatttattatattgaaattattataaaatttatattattttaatttttagaaatgatggttttatttagaagtaagtgagtaaaagtaatgattttataggttttagtgttaaaattttagtttaatgttttttaaatgttttgtttttagaatttttttaaagttttaaaaaatattgtagagtttaaagaattattgtttagttaagtatttattaatatttataattttagaaattaaagttgaaaaatttataaaatatttgttagtttattaaaaataataaatttaatatatgttaatataaataatattttatggaaaataattagtttttaaaattataaatatttagttagagtgggtagttttaaaaaatattgttataaatttttttaatttatgatttaatagaagatagtaggtgatttatatttgtttttgtagaaagattttttagtaaatttgtaagagaatgagagttagaaatgtaaataatgttttatttttatagttgtaattttgtgggttttttggaaagggttttaggggttatttcgacggggtgtttggattatattttgagaattattgtttaaatttaagagtgtgttttttgggtcgggcgcggtggtttacgtttgtaattttagtattttgggaggtcgaggcgggtggattacgaggttaggagatcgagattattttggttaatacggtgaaatttcgtttttattaaaaaatataaaaaattagtttggtgttgtggcgggcgtttgtaattttagttatttaggaggttgaggtaggagaatggcgtgaatttcggaggcggagtttgtagtgagtcgagagagcgttattgtagttcggtttgggcgaaagagttagatttcgttttaaaaaaaaaaaaaaaagtgtgttttttgtttgtgtgtgtgtgtgtgtgtgtgtgtgtgtgtgtgtgtgtgaatgtttttttatttaagaaaaatttaaatgggttattgttttggcgtaggaagtaggtgagggtgcggtggattttagaaaaaataatgttttagttattgattttaagagaatagttttgagataagtgtgggcgtattgaaatattattgtaattttttaaattattgtagagttgttattattaggtgtttggttagaaagatgttatttttttaagatagttatttgtttagatgatgtattttagttttaggaaggaggaggaagaagaggtagatagaatgatgtttaaatttttgcggttcggagacgaggtagtgtttgagttaggaagttgggagagtttagtttagtggaagaggtatgtggattttggttaggtgtgaagttaggagggttttttagttatagtttgaaatcgaagtttaggatcgagttatagtttgaaatttttggatcgtagttttgttaattaaattaatggtaataataataatgtattgttatatatgtaagaattgttatatatggagtattttgagttaggtaatgtgttaagtatttgatagaaattattttattaattttatatagttaattttttgagataattattgtttttattttttttttatagataaataaagtaaggtaggaagagttggaattattaattaaggttatatatattatgttggttgagttgaaatttgaatttagtttcgtcgggttgtaaaaattttttgttgttttttagttgtattagttaggtaaatttttgttagaggaaattttatagttggagtgtagtaggtatagattttttttatttaattggggggaggttgtagttatagcgaagggaatattattgtgttttatgggaagaaatatgaagacggagtggacgttttatttttattttaattagttatttggagggtttagggttgaattgtagtgggggtattataaaatttagggaggtgaggagttttttttagggaggtgatagtttgagtatatggtttttaagtttttagatttttttttgtatttttttttatttagttttgtatttggtattgttgttattagttaggaagtttgagatttgcgtaaatttcgttttttttcgtcgttttcgtaagtattatcgtttttttaaagtttagacgtggggttttttggagttttgttttttagagggtcgtttggtatatggttatttttatatttcgttttttttgagtttagttttttagaggtgtgaattttttataaatatatattattatttaattttttggaaaaataaataggataattgtgtgaaaattttattttaaggtatttttttttttttgtaattagaggttttaaggagtttagtatagtacgagtttttaatttgcgtgtagataagtataaaaggtataatcggatatatttgttattttttaatgatttgagagttcgaagtttatgttaagttttgggttatggtatagtttgtacgtaaggttttgtagtttttgtaggtaattgagaggtggtggtgtataggatagaggaataattttgaagtgatagtatataatttaattttttttaagttttttaagtatgtagattgttttttttttgttagcgtataatttaagtgatttgttttatttaggtaagaaatgtttaatttaaattatattgtagttaagtttttagtgaagaaggagaattttttgaggtttagtcgtgcgtggttaggttggtggtagttgaggtaaagtagattttttttagtttttgtattttttatttaggttatgattggagatacgtgggttggggggttttaattattatatttatttttttgttttatattttatttttcgtgaatgggtttagttttagtaagaatgtttataggagagtgttggttatatgtttttaatatttcgggtttgagttttatttgagttattaggagttgggtgattttagggaaattttttaaattttaattattgtttttttttttttgagaaataggataaatcggtagtgggggtgtatagattggtatattttcgtggtaagcgatttggtttaggaagtaagagatttgtgttttagtttagttttgtttttaattagtagtggatttgtagtaaggaatttttttttgggttttaatttttttatttgtaaaataagtaggttggatgaaatggtttttgaagtttttttagttataaaatattatgtatgttttaaattatttggagtttgataaaataatagttataataattttaattattattgtgatttttttttataattttaaagattttattagttatgtaaattttttaaaatttttttttaaaagtattttttttggttttattgatatgaagtaaagaaggattttaggtttttagatggtaggatttggggtagatattttgtgtttgttttattttttatggaattattaaattttttttttagttacgttagattgttaaatggtttttaagtatagtttatattttaaggttgtttttttagttaaaaatgttttttttttttgtttgttgtgaaatttttttttttttatttttttttttttattatgggatagtttttttttttgggtttttttgagtattttatattattattttattgattttatgttgttatttttggttttgtatttaatatatttttgtttaattagatttttaggaattttgttatttgtattatttagttttttttttttagttttttttagtatttggtatatatttatggaagaattaatttttgaattttgtggattttattataataggataagaatgttgtatgggtttaggatagacgtttataatttgagatgagtagtgttagttttagtttttaaaggaaatttagttagggtggtgattagagatattttgaataattattttaggaaaggattaaatttattgaaaagttgtttattttagtgaaaatgttgtaattgtggaaagatataaaagataaaatgtttataattgtatttttggaagtgtttttttttaaagaataggaattattttattaaagtatttgaagaagaatgtgtgtggttgtttgtatgtagttgtttatatttaagaatgttatatattttattttttttaggattatttagtttaagagaagaattcgaggttatttttagggaggaaaggatatttatattgggaatttaatcgatggtagttaagcgttttttttttttaataattgggataagtatgatatatataattttatatagtatgttcggggagtgaggagagaagttagagaagattgagatgagtgaaatgtaggtttgattgagaaattaagtagaatttttattaatagtgaggattgagggagaagcgtttttgtaatggaggggaaatgaataaaatttcgatttttagttcgatagggatttttttttttttagttagttggaatgtaagttttaaaaaaaaaggaagtgtggggagggttattttttttaataagacgttttagaaatgattatgaatatagtaaagttggtttttaaaaaaggaaagtgagaaaagtagtgataatttgaagttggtagttgaggaagaaggagaatttttgaatttatgaagagagtatattcggtttgggtgggtaggattttaaagtttttaggatcgatggattagaatagagaaatgaaaatgtaataagaatagttgtggggaaaaggtagaaggggggtaggaagcgaagagggtgtgtattttttttttttgatttgagaaagggaaattttgtgttgggaagagttacgcgggaggaggaaggaaaggcgttaggaatgtttggaaggtatatgatgtttgattttatgattttttgtaataatttttatatcgattgtgtttttttatttttgttttaaaaatgtggttaggtaaatatttgttttattaatattgtgagaaattagtttcgtttatagaattttataaaataatttgtaataatgagaggttgttaggatgtaggtgatattaggagaagtaatgttttgtttgaatttttagggttttggaggtatcgttttgggtttaaaatttttttttagtgattttgaacgtaatgaaataggagagaacgttgattttagagtagtaatagtataaattatagttttaatgtttagtaggtttagttcgttggaataattagtttaggaaatgtatgatttaagatgtttttatagtggtttttataaagtttgaaggggaaataaagagaaagttagagagttttttatagaagggaattaattgcgtttatatgtaaaagatttattttttgtggttatttaagagtagtgattttttgggggtggaataatttatatatgtgtaaaaatatttatttttttatatatttattttaagtatgtgttaaaatatttgtaaataattttagattttttttttattttatttttattttaaaggtagtgttatatggatatttaaatgtttagagaggataattttaaatatataaaagaatgataaataaataaataaataaataaataaataaaaaaaagattttttaatttgttattatttgtatgttggaaatcgatagcgttaatttgggtaatatttttttaattttgattgaattatatgttaattttttgcggtggttttagattttagacgttattagtaaattatggaggaaaagtaagattatatgatttatgaattattatagtagtaatagtttttaatttttatttattttttgtgttatgtgatatgttttagaaatttatttaaaattgagaaaataagttatttttaattgtatttaagtaaggaaatagtttatttatgaatttaagaagattaaagaatatggttttagtgtgtttgtttagaatttatgttaaaattttttttcgaagtataaatttggtttttttttttttttttaaaaaaaattttaataaagttaaagaaagaaagaaaggaaagaaagaaagaaagagggttttatatgtagttttagtattaagggattttgataagtaatttatttttgttttgaatgtgggatttttgtattttatgatatatatttttggagtggttttgttttttttgtggttttttttttgtttgttttttgttttttgttttttttgtgtgagatagtggatttttttatttattattgtattattggagttttatgtgatttaatgtataaaaagtgaggttattttttaattagttgtttgggtttttgtaaagtttaatttttatagtttattttaagaggttttttaaaaatgaaattttaagtatgttgtttgatattttttaatatgtttttaattaatttgtaataaagtttagttttttttttattgtatattattgtattttttttgttttttttatgtattgttttttatttattttggtttttcggttttgtttttaacgttagagtgatttttgggtttgtttttttttttttttttttgtttggaaattttttttttgaagaatttttaaatggttgttttttttatgtattttttttcggagtattattttttgatttttttttttagggttttgaatttattttattgttgtttatttagttagttttttttttttagttggtatttattataagtaatttgtttattttgtttttggtgagtttatatttgtttttattattggattataaatatttttaggatagagatttagtttatattatttattattttttttttttagtgtttggtatgtagtaggtgtttaataaatgtgtattgaaagaatggatgagtgatatgatattgatttgtatttattttttttttttagtttatttttgttgagttttggtattgattttatgtgttagtatttgagaaggagagaagtttttgagttgtttcgtaaatgtggtttaagtgagatgttgaatagtgttagttatgtggattttgttatagtgaaggaggaaggtagagaaaatgggttttagtgtgtgtgtatgtgggggtgggaggggtgtgttgatttaggggtgtatagaaaatggtggtgtgttttatgatttttttttttaaagaatgaaattaggatattaattgagtatataagaggggaaagtggtgtagtagggttaaggtataatgaaaagatttagaattattttaaaagagtaggaaagtaaattacgtagagatgtataatagaattttagtgttgagtttttattttattattatgaatttgaagtgagatagttggaatttgggatttttttaatatttgagttgggaaggtaaattgttaattatttttatggagttagtgttttttgattaagtaattttagtttaggaatttattttaaagataattggataagtttgagaaaatgtatatataaagtcgtttaataaaatattttattataattgataataaataaatggaaagtatttaaatatttagtaatatgggattggataaattttgaaatatataatgggatattttgtagttattaaagattgtttgtttatatttattgatatgatgaataggtatgatgagttattggtgaaaaaaatgtagtttttaaattagtatatagtgtaaaatttttttttaaaagtcgtttatatttatgtattttagtataaagaaagatatggaaggatgtttattaaaatgttaaatttttttatttttttttatgtatttttttgaattgggtgaaatgttttataatgagtatttgaaaatagaataaatagaaaaaaaaagatttaattagattttatttgttagtttttgtttttgttattgttgtttttggtgtttttgttatgaaatttttgttagtttttatgtatagaatggtattgtttaggttgttttttagggtttttataattttgggttttatatttaagtttttaatttattttgagttgatttttgtatatggtgtatatgtagttttttatatatggttagcgagttattttagtattatttattgaataaggagttttttttttattgttggtttttgttagttttgtcgaagattagatggttataggcgtgtaggtttatttttgggttttttattttgttttattggtttgtgtgtttttttgtattagtattaggtggttgtggttattgtagttttgtagtatagtttgacgtgatgtttttagttttgttttttttgtatataattgttttggttatgtaggtttttttttgattttatataaattttaaaatagtttttttttttagttttgtgaagaatattattgatagtttgataggaatagtattgattttgtaaattgttttggatagtatggttattttaatgatattgattttttttatttatgagtatggaatgtttttttatttgtttgtgttatttttgatttttttgagtagtgttttgtaatttttattgtagagattttttatttttttggttagttgtatttttaggtgttttatttttttgtggtaattgtgaatgaaattgtatttttgatttggtttttagtttggttgttgttgatgtatagaaatgttagtgatttttgtatattgattttatattatgaaattttgttgaagttgtttattagttgggatttaatgaaatttaagagtttttgtatagtaaaagaaattattaatagagtaaataataatgatttatagtatgggagaaaatatttgtaaattatatatttgataaagatttaatatttagtatttataaggaatttaaatttataagaaaaaagtaattttattaaaaagtgggtaaaggatatgaatagatattttttaaaagaagatatatatgtggttaataagtgtataaaaaaagtttaatattattgattattagagaaatgaaaattaaaattataacgagatattattttatattagttaaaatagttattattaaaaagttaaaaaataatagatgttggtgtggttgtggagaaaagggaatttttatatattgttagtgggagtgtaaattagtttaattattgtggaaagtagtatggtagttttttaaagagttaaaaataaaattattattcgatttagtaattttattattgggtatatatttaaaggaatataaatttttttattataaagatatatgtatatatatgtttattgtagtattatttataatagtaaagatatggaattaatttaaatgtttattagtggtagattagataaagaaaatgtgatatatatatattatggaatattatgttgttttaaaaaaaattagattatgtgttttgtagaaatatgaatggagttgggggttattatttttagtaaatttacgtagaaatagaaaattaaatattttatgtttttatttataaggaggagttaaatgatgagaatatacggatataaagaggggagtaatagatattgggatttatttgagggtggagtgtggtaggaaggcgaggattagaagaaataatttttgggtattaggtttagtatttgggtgatgaaataatttgtatagtaaatttttatgatataagtttatttaggtaataaatttatatatatatttttgaatcgaaaataaaagttaaaagaaaaaagaaagatttatttgtatagtgtttttttttttttttttttatttggtttatttttttttttatttattgtatgtattaattttttagaattttcggtgttttggggattttgaaagattagttagtaggattattgcggggtttagtgtagtgatgtagaggtttttattagtaattttgaagttgaaagagaatatttattttttttatgtataagggatagatttgggggtggtattgaaggttttttttttattttgttggtagttgtagtaatgtattgattagtaggagaggttttttttttaatgagttagaaattaatatttgtggagtttttgttatatattagtattgtgtagggtgttttatatttaaaaaataaatttgggtcgggcgtagtggtttaagtttgtaattttagtattttcggaggtcgaggcgggaggattataaggttaggagatcgagattattttgtttaatatggtgaaattttatttttattaaaaatataaaaattagttgggtatagtggtaggtgtttgtagttttagttattcggtaggttgaggtaggagaatggcgtgaattcgggaggtagagtttgtagtgagtcgagattgcgttattgtattttggtttgggtaatagagcgagattttattttaaaaaaataaaaaaataataaaataaaaataaaaaataaatttgtttaatttttataataattttataacgaaaaaattgttatttttattttatagttgagaaaaaaatgaggtataatgaaataaaagtatttgtatagtatataatataggaaggagtggagtgagaatttaaagttaagtttatagtatgttgtttttaaggtaaaattatttttgatttaaaattatatttttttttttttttaattttttttagttagcgttttattcgtgtggatttgttaggagataaggaaaattaaatttttagtaatgcgtatttagtgtttaataattatattattatatatgaaaaaaatttgaagtttgttagattattattgtatgaaatattttttatttgggattatatagttttgtatttttttgattagttataatttttaggatttagtttttattttagagatttagatttgtgtattttgtatttttttgtattttgtgttattgttttattaagagtatattttaggtgatttttttgtgtgtttttaattttgttattttgtggttattaataatattagttaataataatattattatattgtttattataatgtgcgtttgtgagtattggtaataatttagtagaatagaatgagttagatttttaattgtggtagattacgtgtagtagcgaatagagtatagaaatttcggattttaatttttgattttttggtagtgatatttttttattttattatataaggtataagtggtagaagattagggagaattatagggttgtaagatattttataagttgttaaataaggggatattgttttatttggggtatgttatttaatttttttaatattgtgttaggtaggtattatgaattaaattgtggttatttaaaatttatatttcgaatttcgggtattttagaatataattgtatttggatatggagtttttaaagaggtaattaagttaaaatgaggttgttagagagggttgtaatttaatatgattggtatttttataagaagattgaaaatatagatgtgtatagagtaaagattacgtgaagatataaagaaaatagttatttgtaatttaagaagagagttttagagtatattgtgatttttgatttttggtttttagaattgtgagataatgaatttatatcgtttaagttattagtttgttgtattttgttatggtagtttgaatgggttaatatagtgaggttttttggaagatttttagatggggatttgtatgtaagaagtttaatagggagagtttttaagagtaattttcggagggagagagggaggaaaggaaaattgggtagagagagaagttgatttttgatgtagttgttataaggtttttagttgattttagggtttttagttgattttatagggtgttttggagttgggatggtttcgtagagttgtttggaattaaggtagggtttagggagggagataattttggtaaaggtagttttttttagcgggggaatttttagtgagggatttaattgtggttgtttgtagtgggtattggatagttggggagtgagttttttcgttttgacgaggggtttgggtgatattttatagtatttatcgtagatttgtagtttttagtttgtagattaggataagtataatgtttgtggtgtattttttcgtaggcggttgtgaggagttaatgagataatggatatgaaaatgttttgtaaattgtgaagattattaatatgttgttatgtattattttttgttatttgttgttattttgtttttttattttttttaggtcggaatgattatattttttttttttttagttttatttttgggttattagtatagggaaaaaataagaagaaaaattagagtggaattttaaaaaataaaggttttgtgtttttttgtttaaaatatgtataatttttagttggtattgttaggaatggggatcgtttttatggagaagtggtatttttatttttagttagtttttgtgtgagttggattttaaggttaggagaatgaggaggtcgtgaaggttttggtcgtttttttttttttttatttttattgagatatagatcgagatagggatttataaattattttggagttaaattaggggaaaaaagaaaagtttttttaggtaatagtattttatagtagtaataggaagttgtagggaaaagagaaaagttaaaatttaagtgaaaatttgagttatggtttagagaggttataaatattttttttatggagagttagaagagggaatatagagaaaattgagaggttttttttttgtttgtttgttttgaattttttaaaggagaatttgtttttaattttgtgaagttagtaaatatttttttaaagaatgtgtgtggttatataagttgaagggttagaaaattatttttttatagtttagatggttttaagtgggaatagataggaaggagcgtgagttaaagtttttatttatattataggattttgttgttttagtcgtttttttttgttattagtttaggaagagcgagggttgttttttagatatagggagtttttgtaggttgattttaggtattttagaatgaggtgttcgtatttttttaagtgttgagggttattttattttttttttttttattaagattttttgaattatttagagaatatataagttaaaaataaattatttcggtagatagtgagggtatagaagttttcggtaaggttttttttttaatgaaaattagttttaaatattttttttttttaataaagagtagtttgtgaaattaagttatagatatagatgttagtagaggaatattatttgggattaggtatgtttaaaatggcggttttatttttttttttttttttttttttttttttttttttttttggttagttagtttgtttttgttgttgttgttgttgtttgagacggagtttcgttttgtcgtttaggttggagtgtaatggtatggtggaggtttattgtaatttttattttttaggtttaagcgatttttttgttttagttttttaagtagttgggattataggaatgtattatcgtgtttagttaattttgtattttagtagagacggggttttattatgttggttaggttggttttgaatttttgatttcgtgattcgtttgtttcggttttttaaagtgttgagattataggtgtgagttatcgcgtttagtttatttttttttttttagtgttagttacgtgtatattaaggaatagataatatggcgcgggttaagtggaaagtttttttgtatagtaagatgagggtgaggtagttagttttttttttgttatgtaaatattatatttaatcgaattgatttgtgggttttatgtaaattagatatcgtttttttaaatttgtttaaaaatttggagaatttcgttttagtaagttttttttttttagaagtttcgttttttcgttagagagaaagttgttttttttttttttttttttgtttattaaatttgcgtttttaaaggttttttttgtgtttttgttttaaatttttttggcgttaggtaacgaattttgggtatttattttagataacgaagtcgttttagaatgataaaataatagatatggggatttttggtaaataataaattataaatgaatagagagagattagaaaataaatttaattatagtagaggaggaggggagaaaatagtttttttttttagaaatataggagagatagaaagtaggttgttttgttttgcgtttgttttattttttagtaatatatcgttttggtgtagtgagatttttcgtattatagggtttaattagagatttagttatttttatttacgttgtgagttaagattttgagtaaatgggtttattttgattgtagttaaagtatttggttgggtatattttaatatgaatattatattaataataaaaatcgtggaaatgtggggaaatgtttacgatatgtttataatttaaagtaggttagtagtgtattgttaacgtaaataaaatagtatattgagtgtgattttaatattgaaaaataaaataaagagtattaaatttgttaagtttaaagattagagtgttagatgtaaaatgtttaatgtttttttttgtgatgggattatttttttttttatatttttttgtattttttgatttttttttataataattatgtttttattgtaatttgagatataaaatattagaaaatttggttagatgagttgttttaggattgtgattatttttttataaatagatgttttttaattgataatgggattttgtttttataagtttattataagttgaaaatatcgtatgttaaaaatgtattttatatatttgatttattgaatattatagtttagtttcgtttattttaaatatgtttagaatatttagattagtttatagttgagtaaaattattttatgtaatttattggttattatatcgaaagtgaaaatcgaatggttgtgttgttcgttgaagtatggtttttataaatatatattgtttttgtgttattataaagttaagaaattgttaagttaaattatgagtgagggattatttgtatatttatatatatacggtatgaatatatgggggtgtgtgtgtgtatgtgtttatgtatgtaaatgtgtgttttaaagttttggggtttttttttttttttagttaggagtttttttttttttgttgagttttcgaattttgtataattgtttattatatttttgaaaagataattttttggtatagtatttttagttttttattaagggattttagtagatgtttatttttagtttagtttggatagggttattaaggagtttgtttttggtttttatagttattttttgaagtaagattgaagagggtgggagtattatggtttgttgatttttagttttgtttgtattttttttggtagaaggggttttaggtggtgtttatattttagattttagagaggatattatttttagagagttgaatttaaaaattgatgagttttaaagacgtgaaaaaggatagattttgttagacgagtatttttaggttgttggtacggaattgagggaggaaattgggattattcgtttgatgttgtagtttttttatttttttttcgttattgtgagaggtttggattttttttgatataaatagtttttttttattaaaggatcgtgttattttttttattttttaagtattaaaaggtagtttaagtagattagtgaattaggtaaacgtttatatttttttttgtttttttttttttgtatttggtagaattttttttgttttattgttgatttttttgtaaaagtt

SEQ ID NO: 108 - DNA, 42929 bp, Artificial Sequence
  chemically treated genomic DNA (Homo sapiens)
ggtttttataaagagattaataatagaataggagaaattttattagatgtaaaaagaaaagggtaagggagaatataaacgtttgtttaatttattgatttgtttaaattgttttttaatgtttagaaaatagaaaggatggtacgattttttgatgaaaggaggttgtttatgttagaagaagtttagattttttatagtgacgaggggagaataaaaaagttgtaatattaggcgggtagttttagtttttttttttagtttcgtgttaataatttaagggtgttcgtttggtagggtttgtttttttttacgtttttggagtttattagtttttgggtttagttttttggaggtggtgttttttttaaaatttagaatgtaggtattatttgggattttttttgttaaaggagatataagtagagttggaggttaataaattatggtgtttttattttttttaattttattttaggaagtgattgtggagattaaaggtaggttttttggtggttttatttaagttgagttgggagtgaatatttgttggaattttttggtagaaggttgggggtgttgtattaagagattgtttttttagaaatgtggtgagtaattatgtaagattcgagagtttagtagaggaaaaggggtttttagttgggaaggaagaaggattttagagttttgaaatatatatttatatgtatagatatatgtatatatatatttttatgtatttatatcgtgtgtgtatgaatgtatagatgattttttatttatgatttgatttaataattttttgattttatgatggtataaaggtaatatgtatttgtagaaattatattttaacgaataatataattattcgatttttattttcggtatggtagttaataaattatataagatgattttgtttaattgtaggttaatttaagtgttttgagtatgtttaaggtaggcgaggttaagttatgatgtttagtaggttaggtgtatgaagtgtatttttgatatacggtatttttaatttatgatgggtttataggaataaaattttattattagttgaggagtatttgtttgtggagaaataattataattttggaataatttatttgattaaattttttaatgttttatattttagattatagtagaaatatgattattgtagaaaaaaattaggaaatatagaaaaatataaagaaaaaaataattttattatagaaagaaatattaaatattttgtatttggtattttggtttttgaatttggtagatttagtgttttttattttgttttttaatattggaattatatttaatatattgttttatttacgttgataatgtattgttaatttattttaagttatgaatatatcgtggatatttttttatatttttacgatttttattgttggtataatatttatgttaggatgtgtttaattagatattttaattgtaattaagataaatttatttatttagaattttggtttatagcgtaagtaaaaatgattggatttttagttgggttttataatgcgaaaagttttattatattaggacggtatgttattggagaatggagtaggcgtagaatagggtagtttgttttttgttttttttgtgtttttgggaagagaagttatttttttttttttttttttgttgtgattagatttattttttaatttttttttgtttatttgtggtttattgtttgttagaagtttttatgtttgttgttttgttattttgaagcggtttcgttgtttggggtaaatatttagggttcgttatttggcgttaagaaaatttaggatagggatataaaggaggtttttaggagcgtaggtttaataggtagaagaaagagaaaggagaatagttttttttttagcgagagagcggggtttttgaaagggaaagatttgttggggcggaattttttaaatttttaggtaggtttgaagaggcggtgtttgatttatatagggtttatagattagttcgattaggtgtgatgtttatatagtaggaggaaggttggttattttatttttattttattatgtaaaagagttttttatttgattcgcgttatgttgtttgttttttaatgtatacgtggttggtattgagaaaaggaagatgggttgggcgcggtggtttatatttgtaattttagtattttgggaggtcgaagtaggcggattacgaggttaggagtttaagattagtttgattaatatggtgaagtttcgtttttattaaaatataaaattaattgggtacggtggtgtatttttgtaattttagttatttgggaggttgaggtaggagaatcgtttgaatttgggaggtggaggttgtaatgagtttttattatgttattgtattttagtttgggcgatagagcgagatttcgttttaaataatagtaataataataaaaataaattaattaattaaaaaaaaaaaaaaaaaaaaaaaaaaaaggaagagaagatggaatcgttattttgaatatgtttagttttaggtagtatttttttgttggtatttatgtttgtagtttgattttataggttgttttttgttagaaaggaaaagtatttggggttggtttttattaaaaggaaaattttatcgaggatttttgtatttttattatttgtcgaagtaatttatttttaatttgtgtattttttgagtggtttagagaattttaataaaagaggaggaggtagggtgatttttagtatttaggaaaatacggatattttattttggagtgtttgaagttagtttgtaggaattttttgtgtttgagaggtagttttcgttttttttgagttagtggtagaggaaagcggttggaatagtagggttttgtagtgtgggtgggagttttaatttacgtttttttttatttgtttttatttaaaattatttgggttgtgaggaggtaattttttagttttttaatttgtgtgattatatatattttttaaagagatgtttattagttttataggattaaaaataaatttttttttaaaaagtttaaaataaataaataaaaaaaaaattttttagttttttttgtgtttttttttttgattttttataagaaaggtatttgtggtttttttgaattatgatttagatttttatttgagttttgattttttttttttttttataattttttgttgttgttgtgaaatgttgttgtttgagagggtttttttttttttttttgatttaattttaaggtgatttatgggtttttgtttcgatttatgttttagtagagatgaggggaaaaagagacggttaagatttttacggtttttttatttttttgattttagagtttagtttatatagaggttggttaggagtggaagtgttatttttttatgagggcggtttttatttttgatagtgttaattgaggattgtatatattttaggtagaaaagtataggatttttgttttttagaattttattttgatttttttttttattttttttttgtgttagtgatttaggaataaagttagggaaagagaaaatgtgattatttcggtttggggaaggtgaaaggataggatagtaataaataatagagaatgatgtataatagtatattgatagtttttatagtttgtagagtatttttatatttattattttattagttttttatagtcgtttgcggggaaatgtattataggtattgtgtttattttggtttgtagattaggagttgtaggtttgcgatggatgttgtgagatgttatttagatttttcgttagggcggagaaatttattttttagttgtttagtgtttattgtaaatagttataattgagttttttattgggaattttttcgttgaaggaagttgtttttgttaaggttatttttttttttgggttttgttttgattttaggtaattttacggggttattttagttttagaatattttgtaggattagttgagaattttaggattagttgagaattttgtagtagttgtattagaggttagtttttttttttgtttaatttttttttttttttttttttttttcgggggttgtttttgagagttttttttgttaaattttttgtatgtaagtttttatttgaaagttttttagggaattttattgtattggtttatttaggttgttataataaagtataatagattggtggtttaaacgatataaatttattgttttataattttggaggttagaagttagagattataatgtgttttgggattttttttttgagttgtagatggttgttttttttgtgtttttacgtggtttttgttttgtgtatatttgtgtttttaatttttttataaggatattagttatattagattatagttttttttaataattttattttaatttaattatttttttaaagattttatatttaaatataattatgttttgaggtattcggggttcgaggtatgagttttgggtggttataatttagtttatgatatttatttaatataatgttgaagagattgagtgatatgttttaaataaagtagtgtttttttatttaataatttataaaatattttatagttttgtggttttttttgattttttgttatttatattttatgtaatggaatgggaaggtattattgttaggaaattaagaattaggattcggagtttttgtgttttgttcgttattatacgtgatttattataattgggaatttaatttattttgttttgttaaattgttgttagtgtttataaacgtatattgtagtggatagtataataatattattgttaattgatgttattaatgattataaaatgataaaattaaggatatataaaaaaattatttggagtatatttttggtgaagtaataatatagggtataaaagaatatagaatatatagatttgggtttttgggataaagattagattttaaaaattgtaattgattagaaaaatatagagttgtatggttttaagtgggaaatattttatataatggtgatttgataagttttaaattttttttatgtgtaatgatgtgattgttaaatattagatacgtattgttggaaatttgattttttttgttttttgataaatttatacggatgaaacgttagttggaggagattggggagagaaaagaatatgattttaaattaaaagtagttttgttttgaaaatagtatgttgtaaatttgattttagatttttattttatttttttttatattgtgtgttatgtaagtgtttttgttttattgtgttttattttttttttagttataaaatggagataataattttttcgttgtagaattattgtgaagattaaatagatttattttttatttttattttattatttttttatttttttgagatggagtttcgttttgttgtttaggttagagtgtagtggcgtaatttcggtttattgtaagttttgtttttcgggtttacgttatttttttgttttagtttgtcgagtagttgggattataggtatttgttattatgtttagttaatttttgtatttttagtagagatggggttttattatgttaaataggatggtttcgattttttgattttgtgattttttcgtttcggttttcgaaagtgttgggattataggtttgagttattgcgttcggtttagatttattttttaaatgtaaagtattttgtatagtgttggtgtatagtaggaattttataagtgttagtttttggtttattagagagaaaattttttttgttaattaatgtattgttatagttgttagtaaaatgagagaaagatttttaatgttatttttaaatttattttttatgtataagggaggtggatatttttttttaattttaggattgttggtggaggtttttgtattattgtattgagtttcgtaataattttgttagttgattttttagggtttttagaatatcggaagttttaaagggttaatgtatgtaatggataaggaagagaataaattaagtaagagaaagagagagagagtattatatagatgggtttttttttttttttttaatttttattttcggtttaggagtatatgtataagtttgttatttaggtaaatttgtgttatgggggtttgttgtatagattattttattatttaagtattaagtttagtatttaaaagttattttttttgattttcgtttttttgttatattttatttttaaataggttttaatgtttgttgtttttttttttgtgttcgtgtgtttttattatttagtttttttttataagtgagaatatgaggtatttggttttttgtttttgcgtgaatttattaaggatagtggtttttagttttatttatatttttgtaaagtatatgatttggttttttttaaggtagtatagtattttatggtatatatgtattatattttttttatttgatttgttattgatgggtatttaggttgattttatgtttttgttattatgaatagtgttgtaataaatatatgtgtgtatgtgtttttatagtagaagaatttatatttttttgggtatatatttagtaatgagattgttgggtcgaatggtagttttgtttttagttttttaaggaattgttatattgttttttataatggttgaattaatttatatttttattaatagtgtataagaatttttttttttttataattatattagtatttgttattttttgattttttaatagtagttattttgattggtgtgagatagtatttcgttgtggttttgatttttatttttttaatgattagtgatattgagttttttttatatatttgttggttatatgtatgtttttttttgaaaagtgtttgtttatgttttttgtttattttttaatggggttgttttttttttgtaaatttaaattttttatagatgttgaatattagatttttattagatgtatagtttgtaaatatttttttttatattgtagattattgttgtttattttgttggtagttttttttgttgtgtagaagtttttaagttttattagattttagttgataaataattttagtaaagttttatgatataaaattaatgtataaaaattattggtatttttatatattagtaatagttaagttgagagttaaattaggaatgtaattttatttataattgttataaaagaataaaatatttaggaatatagttaattagggaggtgaaagatttttataatgagaattataaaatattgtttaaaggaattagagatgatataaataaatggaaaaatattttatgtttatggataggaagaattaatattattaaaatggttatattgtttaaagtaatttatagagttagtgttatttttattaaattattaatgatattttttatagaattggaaagaaaaattattttaaaatttatatggaattaaaaaagagtttatatagttaaggtaattgtatgtaaaaagaataaagttggaagtattacgttaaattatattatagggttatagtaattatagttatttggtattggtataaagagatatatagattaatgaaataggataaagagtttagaaataagtttgtacgtttataattatttgattttcgataaaattgataaaaattagtaatggggaaaggattttttatttaataaatggtgttgggataattcgttagttatatgtagaagattatatatatattatatataaaaattaatttaagatgaattaaaaatttaaatgtaaaatttaaaattataaaaattttggaagataatttaggtaatattattttgtatataggaattagtaaagattttatgataaagatattaaaaataataataataaaagtaaaaattgataaatgggatttaattaaatttttttttttttgtttattttgtttttaaatatttattatagaatattttatttaatttaaaaagatatatagaagagggtgagaagatttaatattttggtgaatatttttttatgtttttttttatgttaaaatatatgagtgtaaacgatttttaaaaaagggttttatattatgtgttagtttgaaaattgtattttttttattaataatttattatatttatttattatattaatgaatatagatagatagtttttaatagttgtaaaatattttattgtatgttttagaatttatttaattttatattgttgaatatttaggtattttttatttatttgttgttaattataataaaatattttgttaaacgattttgtatatgtatttttttaaatttgtttaattgtttttaggataaatttttagattaggattgtttggttaaaggatattggttttataaaagtgattaataatttatttttttagtttaagtgttagggaaattttaaattttagttgttttattttaaatttatgatgataaaatggaaatttaatattggaattttattatatatttttacgtggtttgtttttttatttttttaggataattttaaatttttttattatgttttaattttattgtattattttttttttttatatgtttagttgatgttttggttttattttttaaaaaaaaaagttatgaagtatattattattttttgtatatttttaaattaatatattttttttatttttatatatatatatattggaatttattttttttattttttttttttattgtggtagagtttatatggttggtattgtttagtattttatttgagttatatttacgaaataatttaaggattttttttttttttaggtattgatatataaaattaatattaaaatttaataaagatagattaaaaagaaaaaataggtatagattaatattatattatttatttatttttttagtatatatttattgaatatttattatatattaggtattaagggaagagaatggtgagtgatataaattagatttttattttggaagtatttataatttagtggtagaaatagatataaatttattaaaaataagataagtagattgtttgtgatggatgttagttagaaaagagagattgattggatagatagtaatggggtggatttagagttttagaaaggaaggttagggaatgatgtttcgagaggagatatatgaagaaggtagttatttgaaagttttttagagaagaagtttttaggtaaaaaaaaaaaaaaaaaagtaagtttagaaattattttgacgttggaggtaaagtcgggaagttagggtgggtggagagtagtgtatgaaaaaggtaggaagggtataatagtgtgtaataggaagggggttggattttattgtaaattaattgagaatatgttaaagaatattaagtaatatgtttgaaattttatttttaaaagattttttgaggtaaattgtggaaattgaattttatagaaatttaaataattagttggagaatagttttattttttatatattaaattatataaaattttaataatgtaatgatggataaaaaaatttattgttttatataaaaaaaataaaaaataaaaaataaataaaaaaaaaattataaagaaaataaaattattttaaaggtatatattatagagtgtaaaaattttatatttaaagtagaggtgaattatttgttaggattttttagtgttgaaattgtatgtggagtttttttttttttttttttttttttttttttttttttggttttattaaagttttttttaaggaaaagaaaaaaaattagatttatgtttcggaaaaaaattttggtatagattttaaataaatatattaaagttatattttttaatttttttagatttataaatgagttatttttttatttaagtataattaggaatggtttatttttttaattttaagtgagtttttgaaatatattatatgatatagaggatgggtggaaattagaaattgttgttgttgtgatagtttatgaattatatgattttgttttttttttataatttgttaatagcgtttgaaatttaagattatcgtaaggaattaatatataatttaattagagttaaaaggatattatttaagttagcgttgtcggtttttagtatgtaagtggtgataaattaggaaattttttttttatttatttatttatttatttatttatttattatttttttgtatatttaagattgttttttttaaatatttggatatttatgtaatattgtttttaggataaaaataagatggggagggggtttggagttgtttgtagatattttaatatatgtttgaagtaaatatgtagaaaaataaatgtttttatatatgtataaattattttatttttagagagttattgtttttaggtagttataggagatggattttttgtatgtaaacgtagttggtttttttttatgaaaggttttttggttttttttttgttttttttttagattttgtgggggttattgtggggatattttaagttatgtattttttaggttaattattttagcgaattaagtttgttgggtattaaggttgtggtttgtgttattattattttaagattaacgtttttttttattttattacgtttaaggttattaaggaaagattttaaatttaaagcggtgtttttagagttttgggggtttagataaggtattgttttttttagtattatttatattttagtagttttttattattgtaagttgttttgtggaattttgtaaacgaggttaattttttataatgttaataaaatagatatttatttaattatatttttagagtagaggtgaagggatataatcggtgtagaaattgttgtaagagattataaggttagatattatatattttttaggtatttttggcgtttttttttttttttttcgcgtaattttttttagtataaaattttttttttttagattagaaaggaaaagtatatatttttttcgttttttattttttttttgttttttttttatagttgtttttgttgtatttttatttttttgttttggtttatcgattttaaaggttttggagttttgtttatttaaatcgggtatattttttttatgggtttagaagtttttttttttttttaattattagttttaagttgttattattttttttattttttttttttgaaaattagttttattgtgtttatgattatttttgagacgttttattaaaaaaaatagttttttttatattttttttttttttaaagtttgtattttagttggttaggagaagaaaggtttttgtcgagttgggagtcgaggttttatttattttttttttattataggaacgttttttttttaatttttattgttagtagaaattttgtttagttttttaattaagtttgtattttatttattttagttttttttagtttttttttttatttttcgagtatgttatgtaaagttgtatgtgttatatttattttaattattaaagaaaaaggacgtttaattattatcgattgaatttttagtgtaagtgtttttttttttttaaaagtaatttcgaattttttttttaggttgagtgattttgggagaaatgaaatatgtaatatttttaagtataggtagttatatgtaaataattatatatatttttttttaaatattttggtgagatgatttttattttttaaagaaaggtatttttaaggatatagttatgaatattttgttttttatgtttttttatagttataatatttttattaagataagtagttttttaatgaatttgatttttttttgaagtaattgtttaaaatgtttttaattattattttaattaggttttttttggggattggggttagtattgtttattttagattgtgaacgtttattttaaatttatgtagtatttttattttattgtgatgaaatttatagggtttaaaagttaatttttttatgaatgtgtattaggtgttggggaaggttgggaaggagaggttgggtggtatagatgatagagtttttgagggtttagttgagtaaagatatattgaatataaaattaaaaataatagtatgaagttaatggaataatagtgtgaagtgtttaagggagtttagaagagaaaattgttttataatggaaagaggagggtaaaaggaagggagttttatagtagataaggagaaggggtatttttggttgaggaaatagttttgaaatgtaggttatatttagagattatttagtagtttggcgtggttaggggggaaatttgataattttatggggaatgagatagatatagaatgtttattttaaattttattatttgggggtttagaatttttttttgttttatgttagtaaggttaagaaaagtatttttaaagaagaattttaaaagatttgtatggttagtgaaatttttgggattgtaggaagaaattataataataattaaaattattataattattattttgttaaattttaagtgatttaagatatatatagtattttatagttgaaggaattttaaagattattttatttagtttgtttattttatagatgaggaaattgaggtttagagaaaagttttttgttgtaaatttattgttagttgggaataaagttaggttggagtatagattttttgttttttaagttagatcgtttgttacgaaaatgtgttaatttgtgtatttttattatcgatttgttttgttttttagagaagaaaaaataatggttagagtttaagaggtttttttgaagttatttaatttttggtggtttagatgggatttaaattcgggatgttggggatatgtagttaatatttttttgtaaatatttttattaaaattaaatttatttacgagggatgaagtgtgagatagaagagtgagtgtggtgattagagttttttaatttacgtatttttagttatgatttgagtaagaaatataggggttgaaagaggtttgttttgttttagttattattagtttaattacgtacggttaagttttaaggagttttttttttttattaagggtttagttgtaatgtggtttaaattagatattttttgtttgagtagaataaattatttaggttatacgttgataaaaaaggaatagtttgtatgtttggaaagtttagggggaattaaattatgtgttgttattttagagttgtttttttgttttgtatattattattttttaattgtttgtaggagttgtagggttttgcgtgtaagttgtgttataatttaaggtttaatataaatttcgggtttttaggttattgggaaataataggtatattcggttgtgttttttgtgtttgtttgtacgtaaattaaaagttcgtgttatgttgaattttttggagtttttggttatagagaagggaggatgttttagaatggaatttttatataattgttttgtttgtttttttagggaattgggtgatagtgtgtgtttgtaagaagtttatatttttgggaggttgagtttagaaggggcgggatgtggaggtggttatgtgttaggcgattttttagggagtagggttttaaaggattttacgtttgaattttgaagggacggtagtgtttacgggggcggcggggaagggcggggtttgcgtagattttagattttttggttagtagtaataatgttaagtgtagagttaggtggggaggggtgtaggaagggatttgaaagtttgggggttatgtatttaggttgttatttttttaagggaggttttttatttttttaagttttgtgatgtttttattatagtttagttttgaattttttagatggttgattggagtaggaatgaagcgtttatttcgtttttatgtttttttttatgggatataataatatttttttcgttgtgattatagtttttttttagttaagtaggagaaatttatgtttattgtattttaattgtgagattttttttggtaggagtttgtttagttggtgtagttgggaagtagtagagagtttttgtagttcggcggaattgaatttaaattttagtttaattaatatagtgtgtgtgattttgattgataattttaattttttttgttttgttttatttgtttgtaaaaaagggatgagggtaatggttattttaaagggttggttgtgtgggattaatgaaatgatttttgttaagtgtttggtatattgtttggtttaaaatgttttatatatggtagtttttatatatatgatagtatattattattgttattattggtttaattggtagagttgcgatttaaaaattttagattgtggttcgattttgggtttcgattttaggttgtggttaagaagtttttttggttttatatttaattaggatttatatgttttttttattgagttgggtttttttagttttttgatttaggtattatttcgttttcgggtcgtaggggtttgggtattattttgtttgttttttttttttttttttttttggggttaaggtatattatttgggtaggtagttgttttgggaagatgatatttttttagttagatatttggtggtggtaattttgtaatagtttagagggttgtagtggtgttttaatgcgtttatatttgttttagggttatttttttaaaattagtaattgggatattattttttttgaaatttatcgtatttttatttattttttacgttaagataatagtttatttagattttttttggatgaagagatatttatatatatatatatatatatatatatatatatatatataaataaaaaatatatttttttttttttttttgagacggagtttggttttttcgtttaggtcggattgtagtggcgttttttcggtttattgtaagtttcgttttcggggtttacgttatttttttgttttagttttttgagtagttgggattataggcgttcgttataatattaggttaattttttgtattttttagtagagacggggttttatcgtgttagttaagatggtttcgattttttgatttcgtgatttattcgtttcggttttttaaagtgttgggattataggcgtgagttatcgcgttcggtttaaaaaatatatttttaagtttagataatggtttttaaagtgtggtttaggtatttcgtcgggatggtttttgagattttttttaggaaatttataaggttatagttgtgggaataaaatattatttgtatttttaatttttatttttttataaatttattggggggtttttttgtagaaatagatgtgagttatttgttattttttgttaagttataaattaaagagatttgtaataatattttttaaaattgtttattttgattaaatatttgtaattttggaaattagttattttttataaaatgttatttatgttaatatgtattaggtttattatttttaatgaattaataaatattttataagttttttagttttaatttttagaattataaatattgatagatatttagttaaataatagttttttggattttataatattttttaagattttgaagaggttttgaaaataaaatatttgagaaatattgagttaagattttggtattggggtttatgaaattattgtttttgtttatttatttttaaataaaattattatttttgaggattggaatagtgtgaattttatggtaattttaatataatgggtttgagtgtagtagatttagttatgaagtttatgtggaggttgtatgttaattttttgtatgttttagttattgtgttaaaggaagattttttaagttattttaagatttgattgtaaattgtggagattaaattgttgggtagatattaaggatattttgtaaggggaggggaggaagagggtgtgagttgtattaggttttggtaataagatggttttgtttgttgtggttttgggtttttggagggagttagtttatagggtaggagaaggtagtggggtggtttaggtttttaataggtataatagtattagagatttttatagttattgtagttagaggggtggggtttttgtaagatttaggatgatacgtagtgagttaataaatgtgtattggtgtggtatagatgggttttggtgtttgtagatttgaatttaaattttgattttttttatttgtaatttttgtgatatttggtaaatagtttattgtttttgagttttaatttttttgtatataaagtaggttaaatatattaatatttttaggatgattgggagaaataaatgaaattgttaatgtaaaaaatagaaaatagtgtttggtatttagggggaaatattagttattttttttgtttttaaatttgttgtgtggtgtgggagattttaagggaacggaggagtttaagttataggttttggttttatgatgataatattagagagaatgttttttatatttagtaggatatagtgtttcgattgtggtatttaaaattgttgtggtgtttattttttgttgagtgatatgtgttatttaggaggttgaggtaggaggattttttgaatttaggagtttaagattagtttgggtaatatagagagattttgttttaaaaaaaaaaaaaaaaaaaaaaaagatacgtgtaagttgttttttatttttttgatttgttgtaggaagttttaggtattaggtttagagtttagagtaaatgagggtagaaatggaggtttttattagttttgagtgttttttgtgtatttgttgtggaagaggattttattttatttcgtagttttcgggattttattggggtgtggttggtaatttgggggtttagggtttagttatatttttattgtattagaaagtttttgaaatagtgtaggagaatgaggtgtttgggggtatggttgttggttggaggttatagtgttatttttttaaggtttagaaattgggaagttttttttttttttgtatttaaatttttaaaatgtataatttatttttcgtggttgatttagtataatgggaaaaggaaaaacggaggttagttagtttaagagtatagattattgaatttaattttttattttggattggagagtattcgagataattttttttttggtttttagtaagggagagttgggagtttttcgttttgttttttggtataggttttagaagtaggttgttttttttattgtggttgttaaatgggttgtatgttttaggtttgaggttatagtatattttgatttagagttgtaatgtaagaaaaaaaggcggtgttttttgggaagttggatagcgttgcgttatttgtataaattattatcgggaggttttacgatagtatttttttgagtttttttttaattgtattgtatagtatggagttttttgaattttttttagtagggaattgtatgagtgttgttttggagttttattgttatagggttataaagtattcgtaatagttatagagggattgatcgaaagtatagtttggtggaagaggtttattatggttttattaggtttttttgggaatatggtatttttttgtttaaagaattgtttttgtattatttaagggttttgatgtggagcgcgtttgggtgaggagaaattagatgaggagaaagtgttgtagagttgttatttgggagttggagggaaatataaattggttattggtgttgagtttttttgttaatagtagatgtttttgtgagattagtttttttaaggtagcggtaaatggttttttatagaataatgataatagttaatgatgtttgagtatttattatatgttaggtatttttttaaaagttttatatgtattagtttatttagtttttattataattttgtataatcggtattggtatcgtttttattttatatttttatttatttaagtgtaagttggatttagagaagcgatttttagtatggaagttatttcggtgtaagtaggagagttagatttagatttagtttggttttggagtgatgttagtagttatttaatgtgttgtttgagaaacgtaaggaggaagtgattggtgttattttgggttgttaggaatttgtaggtgggtaacggtacgttattttgagagttgttacgttgaattaagtgggttatgtttttatttttgcgaggtttaagtttttgttatgttttggattttattggatagaagtaaggatttagtaagtagtagtaataatgataatggttaattgttattgggtgtttattttgttattaattatgttatttgtttttttataattaatattttatttaatttttaaaattattttttgtggttggtatattatttgttttgtataagtgaggaaagttaggtttagaagggttaaataatatggttaaggttatagtttataaataagagagttggtgtttatatttaagagtgttcggttttagaagttaaatttttaatgattgggtatgttggttgtattgtttttgatattttttggaggattagataagtttagaaggtatttgggtttgcgtttacggtttgtaaagaattgttatttatttaagaggggatatggaggtgtgtggagttggttttttaattttggtttttgtgatgtgttttatagggatgtggaggttcggaattattttcgtttaatgttttattagtttttatttggggattttttttatttgttaggaagaggagataatttgaatataggtatatgtattttttaagagaagaaataggtttgaaagataagtaaaatttttgttttgtttgttttgttttatgttggtaaatttaagttaaagtaattattttttatagaaggaaaagtatttaggtatattttatttggtataaagttaaggtttatagagatgggaattggtaaatttttttagaagatagtgaggatgtagtatatatgtatatatttttatggtttaagtatttttattgagaatcgatattgggggaatatttgtaaatggatttagaattgtatagaaaagtgaaattattgtagtggagtttttaataatagagttgagaataatataaatgattatttaagtcgtcgttgatggttgaaaaaataatgttggttaggcgtagtggtttacgtttataattttagtattttggaggttgaggtgggaagatggtttgagtttaggagttcgagataagtttggataatatagtaaaattttatttttaaaaaatatttaaaaattagttaggtatgttgttacgagtttgtggttttagttatttggaagtttgaggtaggaggattgtttgagtttgggaggtggaggttgtagtgagttaagattatattattgtattttagtttgggtgatagagtaagattttgttttaataataatagtaatgataataataatgttatggttatattatgtagtagtttaaaattatgaagtagatttatttatttatttatatgtataatcgtatgtatgtatataaatagaaggtatatggtatttatggttattttgggaaggggtgggagtgtgagtttttttattttatttttatttttttgtatatttttatatattgattgatttttttgtaataagaatttatgttattacgtgtgtgtgttttaagaataaatatttggttaaaatagaaaaataatttaatatgtataatattttggatgtataatgatgtaattatataatataaatcgtagtttaaagatttttgtttagaagtagtttagattgggttatgttttttttggatagtttttttgttttgttttagtttgtgtttttgggagtattaatatggtttttgtaggttagaatattattttaaagttataagatgtatttaatagaaataaatgtaaaattttatatgtagtatttttttgaaaaattaataatataagtataattgaagatttagttagttattaagttttatattaaaggatgaagatttttgtttattataattttagtagaatatagatgttttaatagtgggatgtaaatatattaaaatagggtaaaaattttgtttgtattgaaagtaatattatgtttaatgggaagtaattatatttttttgggttagatagaatgttatatttgggatattatgtttagttttaggtttatatttagatggatatattgaaaaagtatattgtttagaaggtagagataaggaattggggtatttttaattggtggaaggatggtttagaagtagtataattttatttttaaatatgtgatagtaaaggagaatgagttttgttttatgttattttaaagaatagttttagatttattagaaggtaagaaagtttattttagaattttttttaatattgggaagaattttttagtatttatagttttttaattaaagtagtttaataatagaatagataatagttgagaaatgattattttaatagtagaagggaaaaattttgttgggagttaatggttaaaaaagttgacgtataattatttagtttttgtgtttttcgttgggattatgtaggggaggattaattatttaagttatttaattattaattatttttttaaattttggatatatttagagtttttaatcggaattttggtttatttgtggaaagagaaaaaaatttgtgagggaatgtagatttaatgttaaaaattaagaggtgaatggagagagagagagggagagagagagagagggagagagggagagagggagagagggagagagggagagagggagagagagagagagagagagagagagagagagagagagagatagatagatagatagatagatagatagatagatagatagagagagaaagaaagattagaatttggatgttaattatttaaaaatttggaggttgtattagttaatatgtttatggttagatgttgtgattttagttgagtttaaatgtatatttttttggtggtggggtgttttatttgttgttttatgtatttttttggtaatttggtaaatatttatttttagaaaatgaaaataaaaaggaaaattagtattttttatttgtttaaaggttttttatggttggttaaagaattagggaagtaaagtgtttttttattgattaaagttgtggatagtaggtttttttttttattgttagaaaagttgattttaggttgggcgtagtggtttatggttgtaattttagtattttgggaggtcgaggtaggtggattatttgatgttaggagtttgagattagtttggttaatatggtgaaattttgtttttattaaaaatataaaaattagttaggtatggtggtgtatttttgtagttttagttattggggaggttgaggtaggtgaatcgtttgaatatggtaggtggaggttatagtgagtcgagatggtgttattgtattttagtttgggtaatagagtaagattttgaaaaaaaaagaaagaagaaggagaaggaaaaggaggagagaaaagtttattttaggaagtagagtaggtggtagtagaagtttagagaataaacgtataaaaataattatagattttggcgtttttttttttcgtatggaattattattgtgttaagtcggtgggagttttattttataaatattaagtagtagaggtatatgtttaaacgttgagtaggagaggtaagtatattagttgagagtttagataaagtgattgattatcgtgattattttttagttttagggttgggtattttttttttttttttttttttagttgttgtatttttttgttttttttttttattttttttattttttttttttttgttttgattttttatttttttgtgtgagagagaatgaagagaggaagggagatagtagaatagaaaagggggtatttgagacgagagtggaggttttgagggaatgagggtgaggaagataggagtggatttagagaaagggaaaatgagagatagaatgagagagaagaaagaaggatgaagtaaggggaaggaaaagggtagaaggaagtaaattaaaggaaagaattgggaatgatgttgggaaaaattattaaagtatagtattatttgttgtatttatgaagtatatagaattttgagtagattatgttttttaatataggggtatagtagaattaagggtatgatattgttttatattatattttttttgtttttaaaaggaattgaagaaagtttaagataaaagagataagatatatttaagttatttaaagaataaggacggtatagaaagtataggttataatttatagtgttgaggagaaagattgtaattgagtataaattttttattagttttgaattttaggagtgatatattagatgtaggattttgaatagtagattaattttattttttttttattgtttttgtttataagaaatttttaagagaagttaagaaggtaatgtaagattaaaatgttgggaagatttttttttatgtttttatatttaatttttaattttgatataattatagaagagttttaaggaattataaagaatttttatttatttagattttttaattaatattgattatatttatttttttatttttttttttttttttttttttttttttaaatttttttattttttttttgagttatttgagggtaagtggtagatattatatttttttatttttaaatatgtattttggtgaggaattagaatatatgtagtttttattatatgtatttttgttatttttattaatattagatagagtttatgggtaacgagattggaaggggagtaggagtaggaaatttgttttaagttgtaattatttagtaagtgattatttttttttagattaatttaggttaataaaaatagtagaattttttaaattatttttttattaattttatataggattgagaaaatattaattgtttatatttgtttatatgaaataatattaatagaaatgaggattggtagttaatatttttggtgttaattattttaagaaatttagaaagtgtttaatataaagaaagaatttttgttagtttgtattgttaggtttttgagtttaagttaagttattatattttttgtgatttgtacgtatatatttagatcgtcggtttttgttttaattgatgatattttattataaaagaagtgaaaatggtttgtttttgttttaattgatgatattgttttgtgaaatttttttttttggtttattttggtttaaaagtttttttattgagtattttgtgatttttatttttgtttgttagagaataattttttttttttttttatttatttaaattatataaaacggttttatttgttttttttggttgattttttttttggatttagttcgtttgtatttaggtgattaaaagttttattgtttatataaagtttgtttgatggtttttttatacggatatgtatgaaatttggtgttatgagtcggatcgggggattttttttgggagggtaattttttgtttttttgttttttgttttatgagaaagatttatttacgattttaggtttttagatcgattagtttaaggaatattttattaattttaaatcgggtaagcggtttttttttatttttttttttaattttttttattgttttttaattatttttttttttttattttttaatttttttttttttttaattttaattttttttattttttggtagagataaaggagatacgttttattcgtggatttaaaatttcggcgtcggttagggattgggaaggtagtttttttttggtgtttaattattgtagggattgtaatgattatttatttaggttttagaggtgttagattatgtagggacgtttgttttggttttttatttttagcggtaagttttgtttttttggggaaggggtaagtattttaatttttttttttcgtgtttttattttttttttttttttttggggggtaagaaatttttaatttttttttttttattttgagcggtaagttttgtttttttagaggaggggtaagtattttaatttcgtatttttgtattttaattttttattttcgtgtttcgattttttatttttgcgtttaattttttattttcgcgttttaattttttatatttttgtgttttaattttttatttttatattttaatttttaatttttgtgtttttattttttattttcgtgttttaatttttttttcgtgttttaatttttttttcgtttttttggaaggtaagaatttttaaattttttttttttatgtttttatttttttttttttttaagtttgttttttttattatgggtaattttttattttttatttttttttttttttttttagtttgtgtttttaaaaatttaaaatttttttaatttttatttaaattaaaatttaagtattttatttttttttgtaatgtcgtttgattttaatataaatttaatagtagttttaaatagtcggaaaacggtatttttaatttttttattttataagatttaaataatttttgttgtaaaatgggtaaatggtttgaggtgtttgatatttaggtatttttttatatatcggtttttttttagtttttgtttttaatgtaatttattttaaatttttttttttttttttttatttgtttttttagttttaattttaagcgtcgttgaggttttttaattttttttttttacggatttatttgatttttttttatttttttaggttgtttttcgttaggtttagttaggttttaatttttttttagttttcgtttttttattttataatttttttattattttttttttttatatttggtttgttttatagtttcgtttcgtgattagtttttttttatttgtttagtaattgatttttaaaaaggtggttggagttaaaggtatagttaaggttaatgtttttttttttttattttaaattagatagcgtttttattaaatataaaaatttagtttagttcgtgatttttttggtagtagttttgagacgttttatagttttagattttaaaaggttaaaaggtcgttttatttttaatatatattttattatttaatttgttttcgatattaaataaaattttaaaaattagaatttggtatttaaattttataataggatttaattaatttcgtttttaaggtgtataataatagaaaaaagttgtaattttttgtttttattgtgagataaattttagttatatttttagtatataagaatttttaaacgtttgaatcgtagcggttaggcgtttttttagaatttttttttttaggagtttgttataagtgttagaaatttggttattaggttaaggaatgtttgtagtttaggattttttttaagttatgttttatttgtgtgggattttattggaaatcggattgtttaatttatttggtagttatttttagagtttttggaattttggtttaaggttttttgattgttttttagatttttttggtttagcggttgaagattgatgttgttcgattgttttggaagttttttagattattatagacgtcgagtttcgcgtaatttttatagtggaaagtaagttcgttttttttttaattaatacggaggttatttattttatattattttttttttaagggtttgttttttttgtttttataattgttgtgggtattgatagttaggtttttaaattttttaaaattttttaattttggtggtaatttagataatatttttttaagtatttattttagttatttatatttgtttagtttttttattagggcgagttattttaattaaattatttgtttttttgattatttttggattatagttatattttattgttgtttttttttttagtttaaagttttttttgcgttttttttttatatttttttattttaatttataaatataagatatttttattttttttttggtgatcgattatgtattttttattattttattaaaatttaattatttttatttcgattaatgttaatattttattttatagtatgttttgaaagggttaaagtttgttattatttgtttgttatagtatggttttttaaagtttataaattttttttattatttttttattttatttgttttaaaattaagtaagttttataagttagtttaggatttatgttttattaattaaattgttttgtttatttattttatggtgttaaatttatatatttttttatttttaatatttttttttataatttattattttgttttggattttaaatatgttttttttattatttttttgaattcgttattttagtttttttttgtttttatttggattgattttgatatttattaggtttagtaaattatttgggttgtattgtcgtaaggttttatagatagtttttattattttagttaagtttaaattttatttttatttgttatttattttagtataatttttataaaaatatacgtgttttttttgttgatcgtgttcgattaattttttaaattttaattttttataaaataataacgttttttttttttaggtatggttagtgcggttagaatttttatataagagttaggatcgtattttgtagtttttttatgtaaataatttgattttattgttttagtttagtttttatgtttttatgtagcggttgttgtcgttttaatatttttagaggttttaaaaattataaattatgtttaatttattttttatattttttataatttttaaaatttatttttttttttatatttgacgtatatattttttgtttttcggtttttttagttgtatttagtttttgttaagttttataattattattgtttttggttcggattttaattcggttttttatattatttttgatattatatttgatttttatgattgtatttttttgatttatttgatatttattttatttttttatattttttttttttttgttttttattttgattacgtttgatttattgatggtagttttattaggtttaatcgttatatattagtaaaggtaggttatgttatagtataagttattagttcgttttttagaattttttattttttttttattatggaaatttatttttaaggaaataattttttagtgttttatttgttattttattattttttagggattatttaggttttttttttttttatatattaagtttgaggatttgtttttatttaggattggtaaattagttttatttaatatgttttaagttaggaaattaaaatattttttagtttaaatagatatttttattggataggtagaggttttttttatagggtttgagaaggttatcgtagttatttttttttttttgttagatataattttttagtttagtttttttatttttatatagtttgataatagattagtttttattagttaaattagttaagtagttttttaggtttttagtatttagtgaaatttttatattttttatggtttttcgtttttaggaaaagtagaacggattaaaggttttttaaaaatatattttattaagtttagttattaatttaaaaaggattggataatatttttacgattttttttttttagaagttagatttgtttttagaatgttataaggtatagtttatttgagtttttgtatagacgtttttttttattaggttttagttttattttagatattagattaatttagattgtgttttaaaaaaatttattatttttattattttttgtttagttatatttttatttatcgtttttaattatttatatacgttttgtttttatttatattgtcggtttacgttgtttttttaagttattatagttgatattttttggtgttatttttaaattgttatttttaatttttgaagtaaataaataatttttgttggtaggattgtgttgaatttttttaggtattttttaattagatgttttgagttgttttaatttttagattttttatatttgttttttttttttttttattttatttagttttttaatttatataaaattgtatttaggttattattaataattttaaatgataaatgttttttttaataattttataatattattttttattataaaatttttttttagtttaattttttttattttaggtttttatatcgtttttaatttcgttgaagtagttttgagaaatatcgtttattatttttttatattatttttaaaaattttcgttgttttaaaattttattattatttagttttattttttttattaatataagaagataggaatgttagttttttgagtttaagtaaagttattatattttttgtgatttgtacgtatatatttagatcgtcggtttttgttttaattgatgatattttattataaaagaagtgaaaatggtttgtttttgttttaattgatgatatttttttgtgaaatttttttttttggtttattttggtttaaaagtttttttattgagtattttgtgatttttatttttgttcgttagagaataattttttttttttttttatttttttaaattttataaaatcgttttatttttgttttttttggttgattttttttttagatttagtttatttgtatttaggtgattaaaagttttattgtttatataaagtttgtttggtggtttttttatacggacgcgtatgaaatgtataatgttttgttagttttaaattatatttttaattttttattttatattttcgaaatttggatgtattttagagtcgatgatgtaattataattggtagttttttttttttatgttagtatataaaaataagggtgtattttataaatgatggtttttgagattagataaaatatttttttattagttttgtggttttttgtttgtgtattgttaggaggaaggaagtggagtattttaggtgaggtatagggttttggtattaatttttaagattttttttatggtttagtttttggtgtgtattattttatagtttttttttttatcgtatttttagttatttggtgtgtttttttatttttgttttttttgtttattagtatgtgtttgatgattgaattttgtttatttaaatgttaagagtttattagagatggtttatttttttttattttttttagtgtatgtgggtatgtgtgtttggagatgattggaaaagtatagtggttatttattaaattgatttaggggttatattagagaggaagattatgaagaaaattgagttttagtttgatagtagaagggtagagttttttgggttattggttttaagggtaatgtatatatttgttgatttaaaataataataataataatggttttgggtttttttaggttattttttaatttaaagaaattagtgggtagatatgtatatatggagtggattgggttagttttttggttttttagtatgttttgttatttttttttttttgatgatagaataagtttttgtttatagggtaaaaatttgatgttagtttggttttttggagtttttttaggattttggaagagagttgttttttttttttttgttttgttaattttaagttgtttttttgttatgtaaagagagaaagtttaagtaaagattagtataggtagagagtcggtagagcggtttgggtttttgtattttgtgaagtattacggttatttttttttgtatatgggttagtgtatttttgttttgtttaaataagtttaagttgttttttcgagttaatataagataagatattttaaatttttttttattttaaattatttttttagtttagttgttttttttgaaagttatttgtaataaataatttaagtttgagatttgggagggtagaatgtttatattttgtgttgattgaaaggagatttttgggttttaggtttttgttttggttgagaagttgtgatgataattaaagagtttgcgtagatttttattagaggtagggttttgttttgagttgggtcggggtgttaataggttgttttggatttattcgaagtttttattagggtatcggatggggtatttaatgaagtttgtattataaagttttaagaattttaggtttgaagattttttgtaaaaagtgttattatagttagttattttggtttgttataatcgataagggtttatttttttgatagtatttattaatttagtttttttgatttttgagttatgttttagaaaaagagttgagtttaaggaattatagtttggaggatatatttgatttatttgcgatggtaggaaagtatgtatttagttgatttaaaaattagatggtattattgaggagttggataggcggttttaggaataatttcgttttatattttttaaaaataggaatttatttaaaggtaatttttatttgtttttattttggtagaggtattgtgataaaggtttttaggaatgttaatagtttaggattggtattagtttatagataattttcgtttattaaattaaagtttatgagagattgatgtatgtattagagttttgaattattaggtaaggattttgttaaagttggatatgggaaggttgttatgaaatttattttaaaggttgtgtaggttaatttatttttgggaaattaacgtttattattaaattaatgtaattgtttaaaaattaaaattttattattatttaagttttttattatggtgtgtgaaattatttttagaaaattttttaaaagatatcgaataaaaggtattataggtcgggtacggtggtttatgtttgtaattttagtattttgggaggtttaggttggtggattatttgaggttaggagtttgagattagtttggttagtatggtgaaattttatttttattagaaaaatataaaaattagtcgggtgtggtggtgcgtatttgtaattttagttatttgggaggttgagttaggagaatttggtaggcggaggttgtagtgagtcgagattacgttattgtattgtagtttaggtgatagagtgagattttattttaaaaaaaataaataaataaaaataaaaataaaaaaagttattacgaaaagatatttttttattaggttagtaaattgattgttggttttaattttttaagaagttagattttttttagatatttttttgtgtttttttataatgtaattagttattttagggttagttatgaggtatatttttttggttttttttataagtaatttaattgtaaagggttagtatattattttttttttgttatttttagaatttttaattatgaaaataaaaataataattaaaaagtttttttagttgattttttttttttttttttttttgagatagagttttatttaaattttgttgtttaggttgtagtgtagtggtgtaatttttgtttattgtaatttttgttttttacgtttaattaattttgttgtttttttttttgattttcgagtagttgggattataggtgtgtattattacgttcggttaatttttgtatttttagtagatggggtttcgttatgttggttaggttggtttcgaatttttgattttaagtgattcgttcgtttaagttttttaaagtgttgggattataggcgtgagttattgcgtttagttttacgtgtatttttttttttaagggaggtaggaaagaaggtatttgggttttttatttgtaattttttttcgtgtaaatttatgtgaaggatttggagtgggatttggtggttttaagttttggttttattttttgatggttgcgcgatttgggttaagttacgtaatttttttgaattttagtttatttatttgtaaataggttaataatagtacgagattcgtagcgcgagtggagtttaaagtgtagggttgtttttggtgaatttattatttttatatttattttttgatgaagttagtataatttttatttggttaattagatatattttattttttttttcgagttcgttttttttttcgtttcgtgaagtttttgtttttttagttgttttgaaaattttatgtattagtatgtaggaaagggcgcgttaggcgggggaagttattttcgtttaagcgttttcggttttttttataaagggagggtttttttcgcgatcgtaagcgcgtttaggaagattatagagtcgtcggtgcgtagcgaggtggcgatacgcgttcgggttcggtttgcgggtggtggtttaagcgttcgtttcgttggtttggtaggcgcgattgtgcgtgcgtagtcgagggtggtggcggtcggtattttacgttaagggtggtggtggtcggtattttattttcggtcgtcgttttcgcgtgttaggtgtcgtgagaagcgcgggaggagcggtcgtaggtagcgtttagggatatgattggagtcgattttttagaagcggcgtacgtaaagtttagtttcgtacgtaaaggggaggcgatagtagaaattttaattcgataaagttcgtcggagcgcggagattcgtttttttttgttatttttcgtttcgttcgggtttcgtttcgttagtttttttaggtttttttagtcgttttagtttggtttttcgttttgcgttaacggtttttatcgtagtttgggcggtttcgcgtttattagcgggcggcgttatttggagtggtttttacgcgggaaattttagggttagttgcgttttaggagtttttgtgtgtttaagtattgtcggggtttcggggcgggggagcggttatttttagggatttttgatttcgtcgtaagaattggaaaaaatttagtatgttaaagagtttttattgaggtggtaatttgtttgcgagaatttaagataaaatttaaataattaattaggggcgttgtgaggtaaatcgttgttattatattggtttttcgggaagtaagtttaagtcgcggagagggaagggaggtcgtgcgttcggggcggggcgcgtttttaagtcgagcgtagcggtcggggtaggttgtatcgagcgtggttttggggatatcgtgcggtttcgattggaggtggttgtgatgaagcgcggttatcgtataatggaaacgtgggtattttcgtttttatgaaagtttgttggtagagtttcgaggtcggtcggtgcgtttggacgggagttcgggttaaagcggtttggtgtgcggcgcgtttcgtttttcgtaggtttcgttttgttaggtcgcgttgttttttttttatttagtttttaaaattcggaggagcgggatggcgcgttttgattttggagtgggagtgggagcgagcgtttttgcgattttagttgtgagagtcgtaagggtatgggaattgacgttatttatcgatttttagttttaattttaacgttgtgaggaaatttcgattttgttaggtttttaagggtagcggggttcggcgagcgaggtattttttttcgtttttattttaatttaagcgtttttggtattgacgacgttaagagattcgagtgggagttaaagtttttagtgagggtagtaggtgtttaggtcgggttgcgggtttttgttgacgttttgttttaggtaaaggttttagttttttttcggagtcggttgtttcgcgttattggaaatcgtattttttcgtaggttagtttgtttgtcgaggcgttgttcggcgatttttttagatggattattataggtagcgggtggcgtggtaggtattttaaaggaaattaagcgttatcgtttcgatgttcgtagcgttgtttttagattgtaggaatcgttacgcgttttgcggggaggggaagggtttggcgttgggttatagcgaggtggaaatacgtttttttttttttttaagggagagtgggttggggatgggaaggggcgttttcggttatttttttagagagttagtttcgatttttttatttaacggtatttagtttttagaggttggggtaggggcgtggggcgttcgtttttgtttttgtatttttgagtgttacgtttttttttttttgtttttagtatgggtattagttttagttcgaacgatttttggtcgttaaattcgttgtttatttagtagattacgtttttgttatttttgtcggtgttggttattgtgtatgtgggttagcggttgttgaggtaacggaggcggtagtttcggttcgcgttttcgggttcgtttgcgtggttattgatcggaaacgcggcggcggtgggttaggcggtttatttttcgttcgttcgtttggcgcggcgttacggcgacgttttttagattcgtttgggtagttgttttatagtggtgttgaatggcgagcgcgttatttattaggttttggtgtagtagggttcggttttcgtcgatcggtcggttttcgttttttttcgtgtggtgttcggcggtcgtagtatggttttcggttattattcggagtattggaaggtgtagcggcgcgtagtttatagtatgatgcgtaatttttttacgcgttagtcgcgtagtcgttaagttttcgagggttacgtgttgagcgaggcgcgcgagttggtggcgttgttggtgcgcggtagcgcggacggcgtttttttcgattcgaggtcgttgatcgtcgtggtcgtggttaacgttatgagtgtcgtgtgtttcggttgtcgttatagttacgacgatttcgagtttcgtgagttgtttagttataacgaagagttcgggcgtacggtgggcgcgggtagtttggtggacgtgatgttttggttgtagtatttttttaattcggtgcgtatcgtttttcgcgaattcgagtagtttaatcgtaattttagtaattttattttggataagtttttgaggtattgcgaaagttttcggttcggggtcgtttttcgcgatatgatggacgtttttattttttttgcggaaaagaaggcggtcggggattcgtacggtggtggcgcgcggttggatttggagaacgtatcggttattattattgatattttcggcgttagttaggatattttgtttatcgcgttgtagtggttgttttttttttttattaggtaaagtttttgggaggcgtgggttaggtttttttttttttgaaaaaggcggagtagagatagaatatgttgagtttgtaagtagggtttcgggtttggggtttcgttttaggtttttattttttaaaattaagatcgcgtcggtaaagggatttatagtgagggttgcgatacgcgtacgcgttttatttagcggtgtttcgattttttcggttttttattttgtttttatcgtttttttttttgtttgcgagtgagaatatatttgtaaagatttttttatttttcggaaaaataagagtttttaaatgtttggagatgagttttgatatttttttttttggcgtattataattagaattggaatagtttcgaaagaaaaggtaatgttataaatatgttaaatatagtagttttttttaggttagttttcggcgtgtattcgaggtcgtttagttttggcgttaaaagcgggtcgttcgttagggttttgttttaggttaaggaagtttatggaggtcgggttagtcgataggtaattcgtatagaaatttttagaaggcggttataattagcgggtagcgttaggtttataaaattttcgcgttaggagtttgagaaatgtcggggtagaagataagaagtagttatttttacgaaagtagagtagtatttagaaaggtagatgggatatttaggaggcgtttgtagacgtttttggtttttgcgtttggtttagttagcggattttttgatgtttacgttggtttttattaagtacggatttaataggtttttggtgtcgggttgttagatttggtaaaagaaaagtaagttttatacgggaatatttatattaaaagattagtttttgttgatttgaaatttatatttaattgggcggtttgtagtatttattgtggaaatattatttttaggggtaaatgtttcgtaaggtaaattttgattgtcgaagagattagaaattttggttttgtgttattttttggagtataagtgagtagttggagatgttgaatttgtaggcgttatagaaaggtgtttggaaggtagagaatgattttttttttattaaaatttattgtaatttatatttttttagatattgtatagttatttttataaattaaaagtttttgtatatttaaaatggttttttagtattaaaattatagaaatatttatggtgggtgagggagaggtagaaatcgaataaagaaaagttaattagagattagggaaaaggaaatttcggaataggttttataggtttttgtgtattcgtagataggtattttaatttttgaaacggtttttgttttttattagaattataatagtttttcgagtattttaattaggcggtaaaaagaaataaaataatttggaggttatttttaatttaatatgttgatatttttttttttttttttagtgaaaagacgtatgatagggtttggtaaattatacgatttgtttttgtatatacgttttattgacgtagttatgtttatttatttatatattgtcgatggttgcgtttattttataatataaggtagagtagagtagtgtaataaagagggtttggtttataaagtttaaaatagatattttttggttttttttattatatatgtttttatgaaaaaagttggtagatttttgtaatataatgttgaagaagcgattttaaaaataattttattttattatatacgtgtatatattttttttcggagttgtaaataattagttatttgttttttgatttttaatattttgatttaaggtagtggatatttttaattttttaatatttattttggtaatttttgatggttatatagtattttgttatgataatgtatagttatatataattatttattgaattttaatgttggttattggttttgattgtatttttaaaatttttattttaattttatgtatttatttattttagagatagggttttattattttatttaggttggttttaaatttttgggtttaagtagttttttcgtcgttgtttggtaggtagttggggttataggcgtgtattattatgtttggttaatttttagaattttaggttttgttgtggttatatatttttgtattttttaaattattttttgaaaatatatttttaggtatggattattgggtttaaaatgaggcgggaagaggttatttttatgttttttgtttcgtattaagattttgttttttaaaaagattgtattagtttgtattattaatagtgaataagtattatagtttgtattataattttatgaatattgggtatttgtttttaaatttaaaaaatatagtatgtagttttatttattaggatattaattatttttgtataaaatgagaatagtatgtttgttggaattgtttagggaaatgagggagaaaaaaaatttatttttatattgtaattttcgtgggttttgggtgtttttgtttttgtagattttttatattataaaaaaattaaaaattaaattttatgattattttgatataaagatgaatgtattaaaatgatgtatgaaaatatttttttttaattaaaagtgagtttttttaggtttgaagattgtaaaagacgtaaaaatatttttatgggtttttaaaaagtgttgtgagttttaggtattgtttttgcggtatttaatggaaaagttagttttatttattattgtgttttttgaggttgggaaaatttaagagttttttgatttataatgggaaagatagtattagttatgtaaggtttattataggaaatataatttttaaagtttattttgtaatttagtgagaaattaggaagttgttttagattttttttttagaaatattaatttagttattgagttagatagtttatttaagaaaaagtggaattaaaataaattataatgtgttttttagatgaaataagaattttgtttatttgtttttttttttttatattaaatattaaataggtattttgatgtgtagattcgagtgtaggtagaattggattaggtcgtggggagggatcgtttgttttgtatgggtgattagtttaatttgttttatgttttggtttttttttatgaagttatgcgtttttttagttttgtgtttgttattattttttatgttattattgttaatatttttgttttgggttattatatttttaaggatattgtggtttttgttaattagtggtttgtgaattatgatttagtgaagtggtttaattcggagaattttgatttagttcgatttttggataaggatggttttattaataaggatttgattagtagagtgatgatttttttagtgggtaaaaggcggtgtattggcgaagaattttttaagatgtagttttttttttttatttttattttggtttattagtgcgattttagggttaatttaaatgagtttgcgaaaatgaattttagttatggtttaattattaaatttaagttatttaaagttaatgttatttttagagagtttatggagttttttgatagtgttgtttaaaatttataagttaaggaaatttgttaataagaagtaagaggtaagttgaaattttagaaatatttatattttcggagatgaggagtaaaatttagtttttttttagttttttttttgtgttgttttttaattagcgtttaaggtgagtataaattaattgtttattaggtgaggtgtgttttatatttagcggttttttatgagtagtgggttatgtaggagtttttgggagatttttttgagttaaagatttaaagggtttaatgaattattatatatatattgtattttggttatttttgaaggtagtattttttggagttaaaatgtatatatagatatatatatttaaatatttatattaaattattgaatgaagtagtattttggtaattaggttatttttggtgggaatttaagattggttttttatatgtagaaatagataaaaagtatattaaataaagttttagagtatattgttgaagagatagagataagtaattttagtgtaaagtgtgtgattgaaggtgataagggaaaagataaagattagaaattttttttttatttttttaggaaaataatttagattttagtatttatgggtggatttatttttttgttttttggtatatttttttatttttaaggataaattataaagttagttgtttaaaaagaaattaatagttgaattagtgagtatagtggggttttatgagttattatgaattttaaagtatgtattattaaattgtaaaattttaaggtgatgttgtattttttttgtttgttaaagtatagaatttgaattattagtaaagaaaaaaaaaaaagttagttaagttttaaattatgtgattataatgtattgattttagtaagttttataggttaaaaaaaaaagttattaaatagtgtgaaatatattatttaattgttcgtaagtagtatattagtattattttgtttaggaaaaggttgaataatatatgttttgtataatattgaaaattgaaaagtataattaacgtaattaagtgtgttaaaaatgagtttgattaaattaattatttatttttgatatggaaatgaagtagggttttttttttttatttaaattttggcgaattttaaaattagattttaagatgtgtttttatttttataatatttttattgaaattttatttataatatagaattttgttttgaaaataatttaattaatatattaaaattttaaatttatggtatgtttaaattttaattaaattttaaagttattttgattattgagttttagttgaagttagtggaaatttgaatatttttttgtggaaggtagagaaatttaagttgtgtttgtttaatgaataatggaaaatgttatgaattatttggatgttttttttacgaggtgataagagttggggatagaatttttattataattgattaagttttttttttagatgattttttgaaagttaatattaatgtttgttttttggaaagttagaattagaagatagttttggaagttgtttggaaaagatagtggagatgaggttagttgtgttttttaagatggtaattattttggtagttgggaaagtataaagtttaaatgaaatgtatgtatttatatttagaaaagtgaattgaagttttaagttttaaagtttattgtaattaaatttttaaagaaagttttatagtgttttaagtgttaagtgtttattatattttattaagttttttggaatttttgtattaaaattttaaaaaagggagtttttgatagttgtgtgtatgtgtgtgtggggtggggggatggtaagagaaaagagagaaatattgaaaagaaggaaagatggttaaatatttttttatttattttgaattaattaatttggagtataaaatttaaagtatggatatttagaagaaagatgtttggcgtagtagagttaaattttaaataggttattaaaaaagtttataatatagtagatttgttttgtggtttggaatattaaaaaattttatgtaattttattttaaaattttatagttgtattttttgaatataaaaaattatgttagtatttttaaaggtattagagttaattatataaagtaggtttgtttagtatatttaaattttttggtatttgttattttaaaatattatgttttattaaggttgagatagtgaatttgggttgttgtagtttatttttttagattgagaaatgtgtagttgtaaaaataattatgaattaatttggatgttttattatgttaattaggtttagatgtgttataatttgtttttacgtatgtaggtttagtcgttattagatgtttgcggtaaaaggaaagttgtgtttatatggaagaaagtaaggtgtttggagtttatttggtttatttaatatgtttataatttagttaaagaaaggaaaagaaaataaaaaacgaatgaaaataattgaatttggaggttggagtaattagattattgttttaattagaaatttttattgtgtttttatcggagagagaatgtatttgttgataattattaaagttagaagttttattttaggttattgtaataaagtataatgtttattaaatgttttatttgtatgttaaagttttgattttataagtaaattgtttttttttaaaataaaaagatgttttaggtttgttttgtgaattttttaaaagtttttatgttttagaatttagtttttatttgtgaagtgttattatagttttaatatttttttagtagatttatattagattaaatagttgtatagtagtatatgttaatttgtgtgtttttagttgtgatataattgtgtgattaaaaggtatattttagtagatatttataatttaaggatatttttttatttaatttttttttatttttgtattttattatgaatgtttttagtgtgtgtataatagttatagtgtatagttgtagataaagtatattttggggaaataatatttatatgtagtttttattgtttgatatattaaattaaaaaaaaattgtattttattatttatattgggatattattattaaaataataaaaattatttttataattttgttatgaagttttatgttgtagtaaatatagtttaatgtattattttattttaattattattatggattatttaattaaaatattgtattgtaaatattttatttgtttattttatattttaggtcgaggttatatgtttttttttttcgtaggtttttattaattaaatttttaatttttatatttttgaatttttaagaattaatacggaggttatattttaattaaataattaagttaaatgagaattaatttgtaatgttgaaagattgaatagattgcgattttaagttgttgatcgatttttgttttatttaaagaatgtagtatatattttttttttttagttttatattagttttttttttgagtattttttttttttatttttttaaaggtatatgtgttttaattagtgtaattaatgtttaataaaataagatgggtataagtattttgttatgtattatgtggaaatgttttattgttaatttttttatttggtaaaaatatttgattttatagggtttaggttatgattttttaggtttttattgtgttatatttatagatgatagggtttgcggtattaaaggttttttattttttagattatagtttttattaatg

SEQ ID NO: 109 - DNA, 4108 bp, Artificial Sequence
  chemically treated genomic DNA (Homo sapiens)
tcggtcgtttatgttttaggtttttttttcgcggtgtcggtgaattcgttagtcgtttcgatgtatagtatgatgatggagatcgatttgtattcgttcggcggcgtttaggtttttacgaatttttcgggtttcgtcggggcgggcggcggcgggggcggaggcgggggcggcggcggcggcgggggcgttaaggttaattaggatcgggttaaacggtttatgaacgtttttatggtgtggtttcgcgggtagcggcgtaagatggtttaggagaattttaagatgtataattcggagattagtaagcgtttgggggtcgagtggaaggttatgttcgaggtcgagaagcggtcgtttatcgacgaggttaagcggttgcgcgcgttgtatatgaaggagtattcggattataagtatcggtcgcgtcgtaagattaagacgttgtttaagaaggataagtattcgttggtcggcgggtttttggcggtcggcgcgggtggcggcggcgcggttgtggttatgggcgtgggcgtgggcgtgggcgcggcggtcgtgggttagcgtttggagagtttaggcggcgcggcgggcggcggttacgcgtacgttaacggttgggttaacggcgtttatttcggttcggtggcggcggcggcggcggtcgcggttatgatgtaggaggcgtagttggtttacgggtagtattcgggcgcgggcggcgcgtattcgtacgcgtatttcgcgtattcgtattcgtattattcgtacgcgtattcgtataattcgtagtttatgtatcgttacgatatgggcgcgttgtagtatagttttatttttaattcgtagggttatatgagcgcgtcgttttcgggttacggcggttttttttacggcgtcgcggtcgtcgtcgtcgtcgttgcgggcggcgcgtattagaattcggtcgtggcggcggcggcggcggcggcggtcgcgtcgtcgggcgttttgggcgcgttgggttttttggtgaagtcggagtttagcggtagttcgttcgttttagcgtattcgcgggcgtcgtgtttcggggatttgcgcgagatgattagtatgtatttgttcgtcggcgaggggggcgattcggcggcggtagtagcggtcgcggcgtagagtcggttgtattcgttgtcgtagtattattagggcgcgggcgcgggcgtgaacggtacggtgtttttgacgtatatttagcgttttcgggacgtcggggattttgcggcggcgatttacgagttcgcggttcgcgttcggttttcgtttcgtttcggcgcggcgtggtttttgtatagacgtttttatatttttgttaaaaggaaaatattggagacgaacgtcgggtgacgcgtgttttttatttatttttttcggagattttggcgatcgtcgggcgttgatattagatttgggttttagattgaatttcggtgtttttttgagattttttgtatagtatttattatttacggaggaagcggaaagcgttttttttgttcgaggggataaaaaagttaaaacgaggcgagaggcgaagtttatttttgtatatcggtcggcgcgtttattttttttcgcgttgttttcggacggcgtcgatcgtcggagtttaagtgacgcggagttcgtcgtatttgttataaatgtagtaaggtaggtttaagtatttataagttttttgtagttgttatcgtttttttgggttggtttgttaatttatataaagagattattattattatttttttttttagacggcggagttatattttgggttttgtaaaattttatgtatttgagtatttttatttttttttttgggttttgtattattttttgtaaatgtattgtgaaaaattttattttcggcgttgtaatgcggggaggagaagttagattatgtatatagttttttaaaaagttttttttttaaaaacgaaaaaagattttttatttaaaatgtttcgagttaataaatttaagagatagagtttattttttttataaatttgtaatatgttatttttatgtgtatgttttatgagtttaaaatgtaatgaggaaatttgatagggaaattatttgtatgaattaaaagtaagggaatttcggggaatgggaggataggattttttaaggaattttttttaatgaaagagaaggaagttaaaatttataggttattttgtagagttgagtgttaatacgggtcgagaaataaaagtattttttgtttcggttgttttattgcggacggttggggttgttgcgcgttattttgttgtaagcggggcgttttttatttggttgggggtttgcgttatagtttggtttagaggagggaggaggaagggaagattttagtggtgggattttggattaggttatggatgaaggataaagattagggtaggttacgggttttttaattttttagtaattaagatttcgagtagaatttatttaaatgtgttttaaggaaatataatcgttgaattaaaacgtattgtagtcgagtttttttcgtttattttttgtttttttttttggttttttttttttgggaaaacgggtaaaataattgtgttggatttttatatatatagaaatatcgattattattttttttcgcgtgaattgggatgtaagttgttaatcgatgtgaacgtaaaatgttttgtttattatttttgacgagattttgaggttgtttgatgttttaaattttttaattatattattttttaggtgtttattggtatattgtagttttttttttgaaatttaaaaatttttgtaaaattttgtttttaagtaatttgatagtattaaatattgtatttaaaaattatattgtagtaaatatatttaaaaattaattataacgttaagatgaaattatatttttggaaaaaaaaaatatttgaagtttagatggaaatacgtttattttagtagttttaggttttttttcgtttttttaatatttttttttgttttggagtatggattgttcgtttaaaagtgagtttatgttataagtttaatgagaatcgaatttagtttgtattcgagaatagttttaagtataatgttgatttgataattgacgtgtaatttgggaagttattttgataattttgtttaaattatttattcgttaaagtgattataaaaaagtttaagaatgatgtttattgttttttaataagataataaatttttttttttttttttttttttttatttttattttttttagttatttgattttttttgaagtagttgtttttggaagagtttgtgcgtttatggatggttgagtattattacgatttagttcgggataagggtttttttagtttttttcgggagatgatttgggaaattttataatgtttgttttgttaatttatcgggattttgagggtttaatgggattttgagggttttttttgaaatatataaatttaaaggattttttttgaggttttttgattgacgtttatttttagtttggtttttgtgtttttttgtgtgtattttggagtttttgtgtttaattgttggtatttaggttttggtttaagattaggatgtgggttttattttagaggtatagattatgaaaagttgagttagtgcgttcgggacgttaggtaagtagtttttatagtttggtattttattgtaggtgtttcgtgtatagttagttgaaatagttaatgttaggtgttttaattattttatttttttgttttgttgattagaataatatagaaaaaagtaaatataaatttttaatgattttatttaaaaatattatagggtgggggtaaggaaattagttgagatttattttaggattgagattttattttttttttttcgtttttagtagtgtcgttttaatttaaattagtggagaaaagattatagtaggttttgagtcgattgtgaattcggtgtttggttaaggtaatatttatcgtatttacggagtgaaatattatatgatgatagttattatattatatgacgattttatttattttttaaattatagggt

SEQ ID NO: 110 - DNA, 4108 bp, Artificial Sequence
  chemically treated genomic DNA (Homo sapiens)
attttgtgatttgggaagtgaatgaagtcgttatataatataataattattattatatagtattttatttcgtgaatacgatgagtgttattttggttaagtatcgaatttatagtcggtttagggtttattgtaattttttttttattaatttgaattggagcgatattgttgggggcggggaaggggggatagaattttaattttgagatgaattttagttaatttttttgtttttattttgtgatatttttaaatggagttattaaaaatttatatttgtttttttttgtgttgttttaattaataaaataaggaaataaggtggttggagtatttggtattggttattttagttgattgtgtacgaagtatttgtaataagatgttaaattgtaaaagttgtttgtttggcgtttcgggcgtattaatttagttttttatagtttgtgtttttaaagtggggtttatattttaattttgagttaagatttagatgttaataattggatatagaaattttagggtatatataggggagtataggggttagattgagagtggacgttagttaaagaattttagagagagttttttaagtttgtatattttagagaaaatttttaaggttttattggatttttaaggtttcggtgagttaatagaataagtattataaaattttttaaattatttttcggagaggattggggaggtttttatttcggattaagtcgtagtggtgtttagttatttatgggcgtatagatttttttagaaataattgttttagaaaggattaaatagttaaaagaaataaaaataaagaaaaagaaaagagggggggggtttattattttgttagaaagtagtggatattatttttgaatttttttgtaattattttaacgaatgagtggtttaagtaaaattattaaaatgattttttaaattatacgttaattgttagattagtattatatttaaagttattttcgaatgtaggttgaattcggtttttattaaatttatagtataggtttatttttggacggatagtttatattttaggataaggaagggtgttgagaaagcgaggggaaatttaaggttgttgaaataaacgtatttttatttgggttttaagtgttttttttttttaaaaatataattttattttaacgttgtgattaatttttaaatgtatttgttatagtataatttttaaatgtaatatttaatgttgttagattatttgaagataaagttttatagaaatttttaaattttaaaaaaaaaattgtaatgtattaataaatatttagaaaataatataattaaaaaatttaaagtattaaataattttaagatttcgttaggaataatgaataaggtattttgcgtttatatcggttagtaatttgtattttagtttacgcgggggagggtgatggtcgatatttttgtgtgtgtgagaatttagtataattattttgttcgtttttttaagagaaagaagttagggggaggggtagaggatggacggagggggttcggttgtagtacgttttggtttagcgattgtgtttttttgaaatatatttagataaattttgttcgaaattttaattgttggggaattgggaaattcgtgatttgttttggtttttgttttttatttatggtttggtttagggttttattattggggttttttttttttttttttttttttggattaaattgtggcgtagatttttagttaggtggaaggcgtttcgtttgtagtaaggtaacgcgtagtagttttagtcgttcgtagtgaaatagtcggagtagaagatatttttatttttcggttcgtattaatatttagttttataaaataatttataggttttaattttttttttttttattgaaaaaggttttttgaaaaattttgtttttttatttttcggggtttttttatttttagtttatatagataatttttttgttagatttttttattgtattttgaatttataaaatatgtatataaaaatagtatgttataaatttatggagaaaatgggttttgttttttaaatttgttgattcgaaatattttgggtggggggttttttttcgtttttagaagaaaggttttttagaaaattatgtatataatttgatttttttttttcgtattgtaacgtcgaaaataaaattttttataatgtatttataagaaataatataaaatttaaaaaaaaaaatggaaatgtttagatatataaagttttataaaatttagaatataatttcgtcgtttgaaggagggggtggtggtggtaatttttttgtataaattaataaattaatttaaaagagcggtaataattataaaaaatttgtaagtgtttggatttgttttattatatttataataaatgcgacgagtttcgcgttatttgggtttcggcggtcggcgtcgttcggaagtaacgcggaggaaagtgagcgcgtcggtcggtatataaaagtgggtttcgtttttcgtttcgttttgatttttttgttttttcgagtaaagaaaacgtttttcgtttttttcgtaggtgataaatattgtataaaaagttttaagaaaatatcgaagtttagtttaaaatttaagtttggtgttagcgttcggcggtcgttagggttttcggggaaggtgagtgggggatacgcgttattcggcgttcgtttttagtattttttttttgataagaatgtgggaacgtttgtataaaagttacgtcgcgtcggggcggggcgggagtcgggcgcgggtcgcgagttcgtgggtcgtcgtcgtagagttttcggcgtttcgaaggcgttagatgtgcgttaggggtatcgtgtcgtttacgttcgcgttcgcgttttggtagtgttgcggtagcgagtgtagtcggttttgcgtcgcggtcgttgttgtcgtcgtcgggtcgtttttttcgtcggcgggtaagtatatgttgattatttcgcgtaggttttcggggtacggcgttcgcgagtgcgttggggcgggcgggttgtcgttgggtttcgattttattagagagtttagcgcgtttagggcgttcgacgacgcggtcgtcgtcgtcgtcgtcgtcgttacggtcgagttttggtgcgcgtcgttcgtagcggcggcggcggcggtcgcggcgtcgtaggggaggtcgtcgtagttcgagggcgacgcgtttatgtagttttgcgagttggagatggggttgtattgtagcgcgtttatgtcgtagcggtgtatgggttgcgggttgtgcgggtgcgcgtgcgggtggtgcgggtgcgggtgcgcggggtgcgcgtgcgggtgcgcgtcgttcgcgttcgggtgttgttcgtaggttagttgcgttttttgtattatggtcgcggtcgtcgtcgtcgtcgttatcgagtcggggtaggcgtcgttggtttagtcgttgacgtgcgcgtagtcgtcgttcgtcgcgtcgtttgggttttttaggcgttggtttacggtcgtcgcgtttacgtttacgtttacgtttatggttatagtcgcgtcgtcgttattcgcgtcggtcgttaggagttcgtcggttagcgagtatttgttttttttgagtagcgttttggttttgcggcgcggtcggtatttgtaattcgggtgtttttttatgtgtagcgcgcgtagtcgtttggtttcgtcgatgaacggtcgtttttcggtttcggatatgattttttattcggtttttaggcgtttgttgattttcgagttgtgtattttggggtttttttgggttattttgcgtcgttgttcgcgggattatattatgaaggcgtttatgggtcgtttgattcggttttggttggttttggcgttttcgtcgtcgtcgtcgttttcgttttcgttttcgtcgtcgttcgtttcggcggggttcgagaggttcgtgggggtttgggcgtcgtcgggcgagtgtaggtcggtttttattattatgttgtatatcggggcggttggcgggtttatcggtatcgcgaggagagggtttggagtatagacggtcgg

SEQ ID NO: 111 - DNA, 29262 bp, Artificial Sequence
  chemically treated genomic DNA (Homo sapiens)
ttaagtagaaatgtagtttataatttgtaattgttgtattatttttttttggtaggttagttttttttttatttgattttgaaaattatttggtaggagagagagatagagaaagattaattaaagtgtaaaatttatttttagtttagttagtaaaaatattattgatagttttatggatagtttttttatttttaagtattttttttataggtaaattatatgtttgtttgaagaatgtttttaatattttataatttaattagattagatagtaaattttgagtgtgttttatattttatagtattttatattttatttagtataattttttgtatatgattatatagaaatattttatataattatgttttttaatttttgtatatttgtgtaaattataggtattgggagtttttattgtttttagaagtttagtaagagttagtagggtaggttttagatagagttgagtatgggaaatgttgttttttttgtatataatattttttgggtaaataagatgtgagtttgtgaaaaatgtttgtttggttttattgtagtttattttatttttaagagagaatattttggtttgatttttttgtgtagtaaatttttttattttgggattagttttattttatgtttttgttttgttttggtgtttttttatagattttattttaatttgagaagaagagaattttaagagatattgttatgtaaaatatttttgttattttatatattgattatatttattgtattagggaaaaaatgatttttaaatgtatagtttagtgttatattttttttatgtgatttttttaaaagtgtggatgtggttaattttgtttttttttgtattgaaggagaaatgagtatgattttttattgaatttgtggttgatagggtagtagtttgaggaaattagaaattttattattatttttttttttttttttttttttatttttatagttaattggtgtgtgagttttatgtgttttattattatatttttttttttttgttattgttattttttatgtgtaggtattttatttttgaattattttttgattgattatttgttattagtttttttttttttaaatatttttaattttttgtttaaaaatttttaatggttttttaatatttttaggatagtaaattttttattatttatgagattttgggtatttagagatgaaaaggttttgttttttttattttttttaatttttatttttttatattatttgaattttttatttaattttaaatatgtgttttaattaatttttttaaaaagatttaatttttattgttatttttgattttgatgttaaagttattgtaatagagggaagtatgtggtgttatgtaaagattgagagaagagttgttatttattttgggaatattagaggggagagttgtttgagtagatatgtggagaatagtattttatataaagatatggaaggaggagaggggaattgtatatggtttagttggttgtagttgagggtatggaggaaattttttgtattatattagttattaaattattttttagtttttaattatgtattatatttttagtttttgtgtttttgtttttgttgtggttttgtttttgtagtaaataattgttttttttttaaagtttagtttagatgttattttttttaggaagttttttttaattttgtagttttttttgttagaattatttatttatttttttttgtatttttttagtattttgtttatatttgtattaatgtatttataatatatgttatgattagttgttatttatttgtttttttgttaaatagttgagtttttagagggtaggaagatatgtttagatattttaaaaatttttaaggtttattatagtgtttggtatatggtaggggttagttaataaatgaggagtaaaaatatatagaattatttattagtaggttgagattttgttatttatagtaattattttattttggagttttagatttttatttaaagaaataaaggtgtgaaataatgtgtttttttaggtgtttttttgttttagtattttaagttttgatgataggttgagtgtggtggtttaagttaataattttagttttttgggaggttgaagtaggaaaattgtttgagtttaggagtttgagattagtttgggaaatatggaaaaattttgtttttattaaaaatataaaaaattatttgagtatggaggtgtataattgtagttttagttatataggaggttgaggtaggagaattatttgggaagttgaggttgtagtgagttgagattgtattattgtattttagtttgagtgataaagtgagattttgttttaaaaaaaaaaaaaagaaaaaatttttggtgataaaataaattgatttgattgggttttatgtatttatttgttttttttgtgtaggggaagtgagggaaagattttgatttatattagtaataattaggtgaaaggtattatgtgaggagttagtatttattttattaggttaggatgttttagaggtgggtttaagggtatagggtaataggggaattagttttttataaattgttttggttttaatatttggttttgtgttgtggtttgtaggtttttaggaagattagtgtggttttagatattggagtatatggtaagtatggttttttttgtgaagaagaaaatttttttttgagtttttagggatttaagatgtttttgattagggtggtaaattaagatgaattaggaaggaggggttgtttgaagttgattaggttggagtatttttttgggattatagaagattttaattttagaggagggaatagttaagggtaatttagagtggaatgatgaaaattagttttaatttaatttatgtttatttttttatgatagtatatttaatataattttttaagttaaaatgaaaaataaaaaagaagttattaaagtatttgaaataatggtaaatttttttttaagattggagtggggaagagtataaaaggtaaaaattgaaaaggaaaagattggttgatttgattagatagaaatttaaaattttggtatgttaataaattataaatagattaaattttttaaatataaaatattatagttaatatttaaaggtaattgatataaattaaaaaatatttgtaatatgttaaagaattaatattttagtataagagggtttatataaattaataagaaaatgaatatattaatagaaatatggggagagaatataaatgggtatttataaaatatatgaaaggatgttagatatatgaaaaatgtttaatattattagtaatgaaagaaaaggaaataatatgaaatattaaaatttttttttaagttggtaaagattaaatgaagagatgatatatgttgttttaaagatgggagtagaaattagttgaaattttttggaaagtaatttgaaattatatgttaagatttttaaaaagtttatattttttaatataataatatttttaggagtttaatttaaggaaataatagtggatatatgtaaagatttagttataagggtgtttattatttaaaatttggataaattttaatgtttaatataatagtatatttatatattgttgtgtagtaatagaatgaggtatattttagttaaaataaaaaggaagtaaaaaatgttgtgtattatattttattttgttttataaaagtatttaataagtatttaaaaaggttgaaattttaaaatgttaatattggttatttttaggtggtaagattatgggtgatttttgtttttttttttttttatttttgtatatttaaaattttttataataaggatgtgtatagtttttgagatataaagattgttaattggtaaatatataaaaatttaaaattttttttatgtttttttttttttttttaaatttgaggtagagttttattttgttgtttaggttggagtgttgtggtatgattttagtttgttataatttttgttttttgggtttaagtgatttttttgttttagttttttgagtagttggggttataggtatgtattattatgtttggttattttttttgtatttttggtagagatggggttttattatattggttagggtgtttttaaatttttgattttaagtgatttatttgttttggttttttaaagtattgggattataggatgagttattatgtttgattatattttttttatgttttaaaggttgatgaagatagagtttaattggagatggaaaaaattattaagttaatttttgtaatgagaattatttataatttaattatttttggaaaatgataatatgaaaggaagtagtaaagaagagtattgaagtgtagtatgttagttaatataatagtaaggttgtatattgtaaatttagatagttggaaaagttaaagggttttttaaatagtaataaaaagtatttagtttatatttttagaattataagtaagaagataaatttatagggtatatttggtttatatttggtttatttggaatgttttaagtaagtagtgggttttggggtttaatttgtttataaatgtttttattttgttatttttatttttaaagaattattgaatttttttttttttgagatagggttttgttttgttatttaggtttgagtgtattggtgtgattagagtttattgtagttttgattttttgggtttaagtgatttttttatttttgtttttttagtagttgggattatttgtgtatgttattatatttggttaatttgtgtgtatgtgtttgtgtagagatagggttttagtatgttgtttaggttgattttaaatttttgggtttaagtaatttttttgttttgattttttaaagtgttgagattatagatttgagttattgtgtttagttaaaatttaaaaaaaaattttttttatagttattttttattgaaaggagtttaatttgtatagtattttggaatttgttttgttattttgattttgtattttattttttagagtatgttataaaaagaaagaagaaggaaggaaggaagggaattattgaatataaaatgaatttaataatggttatagatgaaagatgtagataattatatttagggagatgagatgtagtttgtttttaataataaggatttttaatagtaatttggaagagtaattttttataagaatttaaaatgatgatattttagatgaaatttaatattttttataaagttttatttattagtgtttttttgtaataattaattggtttttttatttagtttttgtaagtgttatgaatttgttattagatttgtaaatttaaggatttaatttatgagttttggatatttatttttatataagtttttagtgatttaattttattttttattgttagttttaatttttttgggtataattttaatgtttttattaattatttattgagagtatgttatatatttataatatgttaggtgttgtaggtggtaatagaagaatattttgggtagtttttttttgaatttatttataatgtgggttgggggagtggagagtaatatgagtgaaatagaggaggagttaatatagaaaatttatggtattagaaatgaatataataggattttagaaaattgtgtttattgtaagagtggaaaggttttttggatgtggtaaaattttagttgtgttttagataagaaggaggatttggatgaggggaggtgttttggattagaggaatatggtgtgtagaggtggagggagaggggtgagagtggtttgttaggtaattggagttgagttgggggagaagtagaaataagggtggagaggttgggggaggggtatataattatgataggttttgagagttagttaatttagatatattatgatatatagtgtaaattgttttagttttttgaggtgaagattttgtgttaaatttagagttttaggaagatagggttaagagtagtaggtagaaagggttggagtggagaagggaggtgaggatgtaggttattttgttggtgatggttttttttatttattgttatttttagtaggttttaggtttggggttaggttttgaggttttaagatggttaatgggaagaaataaaaatgaataaaaattatagtaaaatgatgaatgttgtaataaaggaaggtatagggtgttggaggaaaagagaggaagaagagatataattgttggggaaggtgtatataatgtagtggtaaatataatttttggatttatagttgtaaaaatgattagattagtgtgagtgagggagtttggaatggtggaattgggagttatttttaataatttaatttgtttaattgaatatgatttttattgtaaaatatgtttgattagttattttattgttattttaaagtaattttgataatggtggggttttttttaatttatttttttaaatatttatttttatttaattttagttttttttttttttttagtatattttttttatttttttgttgtgttttatttggtttgttgattaaatttattgtttagtattaaaataagttttattttttgtttttttttttatagtgatagtttaataaatttttataagttttggttttttatattagttggtttattatatagttattataagaatgttagtattaaattttaaaatagtatatagtagtaataatttatatttaatagtaattattatttatttgttattatgttaagtattttatgttttttatttatttaattttttttataattttaagaggtaggtagtagtattgttatagtgttgaaaagagattagggaatttttttaaggttatttagttagtgagtagagtagttagtatttatatttggaattttttttatgatttgttatatttttttgtttttgttgtaatggtaaatgtttgttttgttttgtttttttttttttagatttttttattagggttatgtataagtattagtggagagtagttttggaagtttttgttttagtaagtgtagagatttgtttgtttttttttttttttttaattgttgttttttaaatgtggagatttgtttttttttttttatttttttttttttttttttttttttgtttttttttttttttttttttttttttttttattttttttttttttttttttttatttgttttttttttttgttatttttatttgtattttttttatttttatgattatttttgtggtttttattaatttttggaattatgataagaagttaattttttttttttttttttttttttttttggagatggagtttttttgtgttgtttaggttggagggtagtggtgtgattttggtttattgtaatttttgttttttgggtttaagtgatttttttgttttagttttttgagtagttgggatttatattattatattagttaattttttatatttttggtatagatgaggttttattatgttggttaggttggttttaaatttttgattttaagtgatttgtttggtttagttttttaaagtgttaggattataggtgtaagttattgtgtttggttagaagttaaaaatttggatttaagtttagaaatgtttttttagagtttagtgttgttttttttttttttttttttttgttttataattattattataattgtatttattttgtgtttagtatgtgtatagtattttatataggttttttatttagtttttttatttttttaagtgataggaattatttgttttattttatagtttttaaggttatataattagtaagtagtagagtttgaaagtgaatttaggtttggttgatttttgagtttagatttttaatttttatatgttatagtttttagtttaggtttatagtgttttaagtgaattggattttaagtgtggtgattgtgagtatttgtttattttttagtaaaaagttttgtaaaatttttatgagaatttttttatgtttttttttgatgaggttttgtaaattttggtttttttttttttatttgagtgaatttaaatttgttttttagttttatggttttttatatttagttaataagtatataatgtgtatttgttatttttatttgtgtgaaattgattgtttttttgtggtgtatttaaattatgtattatttaaatttgggtatatatatgttatttttttggttagtggagtatgttgtagatgaaaaagaggaaaattttttttgttattgtttaattgaagtgttttatatatgtggtaattatagaggatatatattagtgtatattaaaatgatgaatgagaggtttgaattgaaattggttagtattgtaatattttaatattttgtttaatggaaatatgtattatagagtagttattatgaaaaatataaattattatggattatttaattttttagaatgaatatgaattggtttttattaatgggatgaattatgattatagaggttttatagggagttagaagggtatgttagggatttaatgggatttggatttattttgttagatttaaaagtagggatttgtaaatttaataattagataaatattagttattgggaaaatgtatttaatgttttttattgggggtaaggaattgtgtagttttttttaagatatagttttaaaagttagagaattttagatttttttaaagtatttgttttttatggttttaaagatattttaaatgttttttttttttttaaagttataagtattataatatttttaattatgttattaaaagttattggttatttttttttttttagttttattttaaagttttgtaggtattttttgaatttaaaataattgaagtattatgagttttagttttttttggagtatgtagagaggatatattttgtagatttttttattttttgtggttagagtttttttttattatgtagttatttttatattttgaatttttattaaatgttttggttaaatttagtttgatatgttattaggaatttggtgttatttaaaaatgttatttaagtgtgttatttagttgtgttagtgattatatttaggaagttttaatgaatgaagatttttaggttgatattattgaaattattataattatttaaaaattttttagatgttgatataggaattatttggtataggaattgttaatttgagttttgtgatttttggattaataataagaagtatgttgatattttaaaaaagtgttttggaaaaaattaattttaaatatatataattagaaaaataagtttgtaggttaggtatagtggtttatgtttgtaattttagtattttgggaggttgaggtgggtggattatttgaggttaggagtttgagatttgtttgattaatatggtgaaattttgtttttattaaaaatgtaaaaattagttaggtgtagtggtgtgtgtttgtagtattagttattttggaggttgagataggagaattgtttgaatttaggtggtagaggttgtagtgagttgagattgtgttattgtattttagtttgggtgatagagtaagattttattttaaaaagaaaaaaaaaataagtttgtatattatttttttatttttttttttttggagaggtaatatgattaaattaaagtttggaaagtttgaaaaatattattgggatgtatttgtttagatgtgatttagattagggtaggtgaattttaaaaatttggatatttattataaagttttaggaaattttaagattttgggagtagaattaatagtttttaggttataatattttttgtttttaaatttagaatggaattttaatattaaatatggatgggaaatttaaaattattaaaattataataattttatttaataaaatagattgtgtatattgagtttttaaagtttagatttttatatttatatatattttaagtattaggaagttattaggaataatttgagaatgaaagttaatttttttttgttttttttattttagagaatgtaaatataaagtagtttttttgttttaaaatttataattgaattatatttaaatatttaaatatatttatatatttaattatatatttatatatattttaaaatatgtataatatgtatatatagatatatatatatttatatataaatattaaaaggtttttggaagaaattttatttgtgagttaatttaaagtttaaataaaattaaaatttatgaatatttaggtagattatgggaagattgtgtgtgttttgtataattgtttaatatttagaattatatttttaagtttaataatagaaatgtaattaattattataaatataatgaaataaaagtgattttttattgaatattgggaaagatgtgtttttttttaatatttggaatttttgttttagttgtttttgtaaatttatttgtttaaataaaattttttgaagtttttttaataaaaaaaagaagagttattttattaatttttataaataattttttagagaattgttatatatggtaatttattattataagataaaatattttattagtttaaaaagtgttgtatagatataggatagattttgtgtagaaatttatgaatataaattaatgtaatatattattttaaagtattatattatagtgttatgtattgattgatatgtatgtattaattttaattatatttatttaatggtttatatattatttatatgttgtttgttaagttaaaaatatggtggagaataaaaatatttttttattatttttatagttgtttaaagttaagagaagttttatagaattgaaatttttatttatttttttttatattttttatatttttttttagtgaatgaggtgagttggttttttgtgtatgtttattttttaaaaaagtaggaaaaatattattagttttgtgtaggttagttttgtaagtttttttttatatttttttttaatatttgtaaaatagtttatttaatataatttgaaattggaagtttttataattaaatgttgtttttatttatttgtatataatttttttgaaatatggaggggaggtgtagaaaaggagggtagagtttgtttggtttgtgatggtagtttttgaaaagtagatttttgaagttattttttttttaattttttattgttatttatttttataaggaaggaaattgttagaatgggtaaaagaggagtttggatagttaagatttttggtagaaatttgattggagttttattgttttttgaagggaggaagtttggtttgaatggaaaggtttttaagattagaggtaggtgtttagtttttttgggttattaaaatttgggatattgaaaaagaaatgtgaggaggttttgagttgtaaatgataagtttggaggggttttttaataattgatagtttgtttttttttaaaaaaaataatttgggttgggtgtggtggtttatgtttataattttagtattttgggatgttgaggtgggtagattatttgatgttaggagtttaagattagtttgattaatatggagaaattttgtttttatgaaaaatataaaattagttgggtgtggtggtgtatgtttgtaattttagttatttgagaggttgaggtagaagaattatttgaatttgggaggtggaggttgtggtgagttgagattatatttttgtattttagtttgggtaataagagtgaaattttattttaaaaaaaaaaaaaaaattaatttaaagttaggtgtggtgatttatatttgtaattgggaggttgaggtgggaggattgtttgaggttaggagtttgagattaatttgggtaatatggtaaaattttgtttttataaaaatagaaaaattagttgaatgtggtgatgtgtatttgtagttttagtaatttggaggttaaggtgggaggattatttgagtttaggagattgaggttgtagtgagttgtgattgtattattgtattttagtttgggtgattttgttttaaaaaaataaataaataaataaaataaaaagtaaaaaaaaattaaaaattaatttaaaatagagataaaataagttaatttatattagtttgtaaatagtgatttgtttgttgatattttttaattgtttttttttgattaaagaaaattatattgtgtataaaggttagattgttatttttattttgtttatatgttgattaggatggtaagttaagaaaatgtttttatttatagttatgaattgagtttataaatttggtttaaataaattagaatttaattatttaggtaattagaatttttaaaaaatttaattttttatttttaatgtttatataatttaattaagttttttatttttgtttgaagaggtgtggtagaataaataaaggggttttgaggttttatggattttttttttttttattttattttttttttgtgtttttagagttttttgtataggttttaggtatggtgttgtttttttattttttttttttagttagtgggttatgtgttatttggtggtagaggttaggtatggttagtgtttagtatagtgttgaatatataataagtatttaataaagggtttgtagttgtttttgaaaaggattttaggaggttgtaaattttaaattatagtaagtgggggttagaatttattaaagatttttttattatttattttttttagtaaaaattaaaatgtaatggttttgggtatttgtagaagtatggggagatttttttgttgaggtaaaaatttttgtaaagagggaaatagaatttttttttgaagtgttgatttataatagtattatggatagatagggaaatttttaatatgatattattaatggtaatttaagtgtattttatttgatgattgtgaggagtatgtttgtgtgtgtttgtgtatgtgtgtgtgtgtgtaggtaaatatatttgtgaaaatatatataaatattttaggatatatgtattattagaggaaggagtttaataatatttttggtatttttaagttttttaatagtaagtattttttttaatatttagattagatttttatagttttatttttatttttattttggatatgatttttttataggtttagatgtatttttgaattttgatattttggtttttttttttatataaaaagaaaatagagaggaaatatttgtgaagtattttaaatatagattttaatgtaatttttagaaaaatattgttatttaaaataagagtaatatgaaggttgataataaattattaatgggtaaattaagaaaaatagtattttgagatgaagatatatgtatattatgtgtagttttagttaattagttaaaggtgtagaagttttaaaaatattggtatataatattgaatttgaataagagaagaaagaagtatgtatgtatttttgtatttatttgtagggtataatgatattattattttataatttttttaattatttaaagtatgatttaaatgagatttttatttttgaataggtaattttagaaattatagttttattaaattatagattagattttttttgatttattagtatattttgtggattgtttattttatattatgttttagttagatagttgaatttaaaaattaaaatatgatatgtaaaatgtattttttttttattttataattagtagttttatattggtatgaaattattaaataagtagttagtaaatggaaattatattaaatataggtaaatttattgatgatgttaataaaaagtttgtttttttattagttttgtagaggttttattaataatttgtattggtatttattttaaatagatattttgttgtattttttgggtaaaatttgttaattttgagtttagaggatttgaatgttttatttataaagggtttttaaaatggttaaatgttaggtaaataaaaagtatagaagtttttgttgttttttgtgtattttttattggattgttgttttttgtatattattaatttgtgaaaattagattgttaatggtggttaaaaatgatttttgggagtttggatatatttgtttattattattgttaatggtttttatttggttaaaaaaaaaggtagtttaatattagattaaataaatgtgatttagttgatagtgagtttttaatttttttaaaaatttttttaggttggttatattttatttttttagaattaatgaatgggtttggaaatatttttaaagtgtttatttttttattttttatattttttttattttttttgtttttaaatatggattgttttagaaatttgtatgttatttttgtataggggttatgttaattttttttgtattgttttaattttagtatatgtgttgttaaagtgagtaatggattttttttttgaaaaaggggttggtgagttagatgtggtggtttatgtgtataattttagtattttgggaggttgaggtaggtggattatttaaggttaggagtttaagattagtttggttaatatggtgaaattttatttttattaaaaatataaaaattagttgggtatggtggtaggtatttgtaattttagttatttgggaggttgaggtaggagaattgtttgaatttaggaggtagagattgtagtaaattgagattatgttattgtattttagtttgggtgatagagtaaaattttattttagggaaaaaaaaaaagagagggggtggggggaagtatagtaattttaatagtgtagagttgtaggagagaaaattatatatggaagaagtatattttttggaagtttagttttaaatatatttaagattgtagaaaaaaattggtttgaagttggagagtaatgggtaattagggtataaaatgttttttgtggatggaagtgattaaaagttgttgttaaaggtttagtgttatggtttatatttgtaattttagaattttgggaggttgagggagagtgtttgaatttaggagtttgatattagattgtgtaatatggtgaaattttgtttgtataaaaaagataaaaattagttgggagtggtggtgtatttttttagttttggttaatttgagtgggaagattatttgagttttggaggttaaggttgaggtgagttattattgtattattggttattgtattttagtttgggtgatagagtgagattttgatttaaatataaaaaagaagaagaaaagaaaaagttgttgtttaggaaggtgtttatattaggattttttaagtgtatatttgtaggatattgtgatttgtatggtttttgagaattttgtttatttaggagggtggaggtagtattgtgttatattagggaaattatattattgttgagtgtaattggagattagagagtttggaatgttaggagttggtttttttggtttttttaaggatttttaatagtagtggttttatattttaggtgaatattttaatttatttttggttttgtttttatatgttattagaaattggaagtatgagaaagatgggtgagagaagtaatatgttgaagtagatatgagtagtaaatagtaaatgaggaggagatggattatatgaataatataaataagtaaaaaaaaaaaaaaaaaaaaatagttaatagatttaatagtattagtttttaaggtattagaataattatttttttttaaatattatggtaagtttttgtttaagaatttgtaatggttttttatggtttttattaaagattttattttaaagttttttttataaagtttttaggtttttttatttttgtttaatttgttgagttattttgtttttttttttgagataagtttttgttttgttatttaggttggagtgtatttatataatttaggtttattgtagttttaattttttgggtttaggtaatttttttattttagttttttaggtagttgggattataggtgtatattattatgtttggttagtttttttttgtattttttttgtagagatggggttttattatgttgtttaggttggttttgaatttttgagtttatgtgatttatttattttgtttttgtaaaatgttggaattatatgtttgagttattgtatttggtttattttgtgtttattgtttaataggtatttattttttatatttgttgtttataattgttttatgttatttttttgttttaaggtgttttttttttttttttttgtgtaattaaaattagaatgttatttaagtttttttttgttaaggattgaatgtttgtgttttttttatttttaaattaatatatttaaattttaatttttaaggtggtggtattagagaagggggtggggggttttgggaggtgattaggttaggagggtagattatttatgaatgggattaatgtttttataaaagaaattttagggagttttttttttatttttttattatgtgaggatatagtaagaaaatggttatttatgaattaggaagagagtttttttattaattattgaatttgttagtgttttgattttggattttttagtatttagaattgagaaaaatagatattgtttaagttatttagttgatggtattattttttttttatagtagtttggttagattaagatattttttttttataaggtttttttaatttttgtaaattttattgatttatttttttttgggttgaagttttaagtgtttattgtttttattttgtttttttgtatttgatgttttagtgttttataatattagtttggttttttttagttagaaaatatattttttgagggtagagagattttattttataggtaattttgattatttttattttaggaaagggtataaatatattttataaatatttgttgtattttttaatttattttgttttgtaagagaaatattaattaatgttattttaaatttttagttgttatgatgagttttaaagtattaatttgtttttatatgtgaaaagtatattttgatttatttgtatattttgattaaattaggttaattatatatttagtttattggggaaatttgtgatgttttaatagaaaataagttttgtttttatttgatattttgaaaattttttttaggaataaataaaattatagtattaaattttaattatgatttgaaaatattaattagtgtatatgtttattgtagtttttaatagtaaaaatattgtatatttttagagtttatttaattataagagttaaatgaatggttaggtgatttgttttgttggtggatatgagagaggagaagttgattaaatagttattattttttttaagttgaattttgaatttaataaataagagtatttaaatattgtgttttgtatatatgtagggtatattatgtatatggggtataatatgaaatttttgttatttgaataaagattaaaaaatgtggtatttatttattttttttatggaaatatatttttttttttttttattattttttttttttttttttttttttttttttttgagatagggttttgttttgttgtttaggttggagtgtagtggtgtgaatatggtttattgtagtttgtttttttgggtttatgtgatttttttattttagtttttagagtagttgtgttattatgttaggttaatttttaaaaatattttgtaggtttatttatgttgtttagtttggttttgaatttttgggtttagggaatttttttgttttatttttttaaagtattgggattataagtatgagttattgtattaggttgtttttagttattttatttttatttggttttttattttttgttttggttgttttttttttaaatttttttttgagttaataattggtatttagaagtatggttttagttagtagttttagggattaagtggttgtttattattgaaagggttattatgtttttttagtattattgttgatattttatgaaaaatatttggagaaaatgttttgttttgattttttttaatagaaggaaaatgtttgtttatagaggaagtttgtagaaaaaaagaaagaaagtgtgttatttaattgtatatttataggtaaatttagtaaataattttttttttttttttttttttttttttttttttttttgagagggagttttgttttgttatttaggttggagtgtagtggtatagttttagtttattgttatttttgttttttggatttaagtgatttttttgttttagttttttgagtagttgggattataggtggttgttattatatttggttaatttttgtatttttaatatagatagggttttattttgttggttaggttggttttgaatttttgattttaggtaatttatttgttttagttttttaaagtgttgggattataggtatgagttattgtgtttggttaatttagtaaataaaattattttagtttaagattgtgtttatatatgagatatatatgtattttaatatttggatgaagaaaggtattataattttggttaagtgtttagatgtttttatagtttgtgtagatttatgtgttagttgtgtttgtgttttgttgtaggggagtatattttagaagagaagttattttttgtatgtaaagttgtaaataatttttgtatgttgtttttaatgtatttttttgtttttttatgttgggttgaggttttgtttttttgttgtttaatagtaggtatagggtttggttattgttgaataaaagttttatgtatgtatgtttaatttttaaataaattttgaattttaaaattgattttagttttataatttgtttttaagtgagattttttggattttttattttttttgtttttgatatttttagaggtataatttggatagggttaaagttaatttatagttagtgtaattagtatatttaagaataattaaaatatagtataatatatggtatagagaggtttttaaaaatattttgtattaagttattaaaaaattaattatataaaaaagtaaggttaaataatttttttttttattagtgggatatagatttttaattttttggtgttaaattttatattgaatgattttttttgtgatgtttggtattttagtgaggttatagaatagaaaagaaaaaaaaattaatattattggaaagtatatgttatagaatgaattaattaaatattaattttattagtgaaaaaaaaaggagtaagtgtaagattaattaatattagtgggattatagtaaattaagagttatggtaaattttataatttatgattaaaatttattgtaaggtgtatatatgttgtattttgaattagtaaattaaatatttttgattagtgtgttttgagtttatttagaaagtttttgagttttagaattggttttgtgagttaatgttgtttaatttttttttttggatatttttttattgtttttttttatttttttgagttttatatttttaataattattagtaagaaggaaatgtttataaataaaaataaataaatatttgaaataaggaaattatttaattttgaatttatgtattgaaagattttaaaatatattgtatataattaaatgttgttagtaaattagagataggaggttttattaaattttataggtatattaattgagaaataaaatagtttaagggtttatttaatgttatttagtgagggaattaaaatttagatttattagtttatattttaaagaattttttttattttttgtttttttttaaaaaaattataagtatgtttaaaaatagaatggaataatgaattagagtgttttatttgttatatatttatgagaagtgtaattgttttttattatttttagaaatttgtttatagtatattaagtatattagagaattatattagtgaaaattaaattgattttaaaatttttatatatataaaaagatgtagttatgtttatattgtaatggtattagtgtttttttagtgaaggggattgaaaagtggggatgattttattttatttgatttttttgatttgtaatagttttgagttgttttattagtttattttattgtatttaattttaaattatttaattttattaaagttatttaaaatggaaatgtaaaattttattttgggattgtaattggaaatattgttatttatatttttgagtaggtaatattttgatgaaattattattttttttatttatttgatttgggtttaattttaaaggatttatagataaaagtttttttggtttttgggtaattttggttgtttgagaattttatgtttggttttttaattatatagaattatatttgttgtatgtaaggttaatgattattaatagggaggttttaaaaaaattatttaaaaatgtaatttttttaaaattaatgaaaagtaatagttattgataaggttgatagattaaagaaaggttaaatttaattaaaatgatgaattaaaatattaattggaataaagtattgttgttaaattgaattttttaaagggattaattaaatataggtttatatttttgtttagagaaaggttatagagattttttggttaattatatttatggttgttatgggagtgaaaaatttttataaaaattaaaaattgtatattgatttattaggtagtttgaaaagatattttgttttttttttgttatagttatataagtatagaaataaaatattgatattttttaataataatggttgaattaaatattggattggttaaagggatatagggttatataaattttattagatggttttttgtgtagattatgattatagtatttatattgtttttttaggtaatttgttttttttttttgattggaagtaatgtgagggtagggatttgtattgatttttatttttgaatttttagagtttaggaaagtatttattatatagtaggtatttaaagatatttgtggagtaaataagtaaataaataaatgaatgttattatgtagataatggttgttatatgggggaaaatatttttattaatgagtaaagaatattggataaaatatttggttgttattattttaaagtagttaattataagtgtttataatttttttggtttatttgaatttttgatattttgttaaataaatggatttttaggatttgattataagtaaatatattaatattaaaatataggttatttgggttttagtttgggatttttttaaatgtgtattttaatttgaggattataagttaattttttttaaaagtaatggtagttgatggtgtattaagttaagttttatatagtttaaattttttaaatatttattggtgtttaaaatatttttatgtgttaagtaaaaaataaaaaataaataaataaataaaaaaaaaatttataatgatgaagtttttgtgatttaagattttaagataaagttaataaagtatagtttttatttgaaatttgtttattttgataatatatttttattttttttatgttttatttgttttttatttaatataggataataagattgtataattttttattatatattttttagaataatgtgagaatgaaattgtgatatggaaaaattaatgtggaataagtttttttgggaatttgtattaaattaattattgtgaggtagggattagtaatattttaatagtattattatgtgttattattaatataattattgattgtattgttttgagttttaggtattgtggaatttttatatgaatattgattttgattgtatttttatttatttttttttagtatttatatttttattttaatattaaataatagtagatattatggtttttatttgtttggttattatttttaaggttttgatggtttgttagggtttattaggttaataagtatggggaaaataaattttttttaaagttaggaatttgtttttaaattttatttaaattagaggaagatgaaagagagaaatttagtttttaataaatatatagagattattaatatatatgaaatgaagagaatatagttttgtgaaggatttagtttgtttaaatatatttattaatagattgtttgtgggtatgggtatgtatggttgttgaaatgttaattgaaaattttttaaaaaaattatgaatgttagttgttaaatgtagtgtaggaaattaaagtttttaaaagtaaattttagattgtgaaatttggatttttttattaaatttatagaaaatattttaaatattaaattattttataattttgtatgaattattgttattttttgaaaagttattgtatatgttttattttttatagtatatttataaaaatttttatttaaatagagtttagtagaagtagatttatgaagattgatatttatttagtagataaatgaaatttagggttggggtaaagtttgatgtttgtttaaatgtgttattttgtattaaatatatgtatataataatttgaattttaatattattaatagttgattttaaggtaaaaatttttaaatgtaggaagttaaaaataaattaaaattaatgtgtgtaaattataatgtattaattttaataagtgattttaaagtttgttttaatattggtgaatggaaagtaggttttatattttgtttttgaatgggttatgttatttaaaaaatatatagttattgttatatgaaagtttttttattttatttaattttaggttttatgggggtttgtttttaaaatggggttatatataagataaaataaaataaaataataatttttttaaattaagtttttgatagtgttattgagatgtgatattgtttttaaattttttttttgagttttgtttgttttggtagagaggaatgggaattttttaagtgtttattggttgtataagatagatttagtaaaggtttttaatttattttagtagttgaaatggttggaggtgatttgtatttattggagtatatatagattttttatttgtggtttttaggtatgggagaaattgggttatttttaaatttatttttagatatatagagttgttaaatattatttgatttgggattaaggaatgtttttaaaattgtttttttatatttatgaatgtgttgtttttagtggttattaatttttatatatattaaataaataaaagtaattgattatttagaaatgtttgggaaatggtaagatattatagaattaattgaatagaattataaatttttttttgtgtgagtgtatgtaaatttattagaaattttttggtagtaatgttttttattttaggttttaattttgtgaaatattatattagggaggaggtagtttttggaaaatattattgtttttgtgattttagagtgtaataggaaaatttatatttaataattttattatattagatatttagggtaaatttgtaaaagataattttatgaatttttaaaggatataaggttttaatatgtggaagtgataataataaaaatatttaaaatgtgttaataaataggtaatgttataatgtataaaatgatagtattgtgtattatatgtagatttgtggttattaattaatgatatgttataaaattattattaataattttttagtattattaattaaaattgaatattgattaatatttatattatatttatgaaataatttggaaatatttgatgatatataaagttttttttttatgatatataaaatattttattttattaaagtaggtatttgttttttgttattaaaaatattgagaagtttttttatgagaaaataaaaataaaggtttggagattttttttattgtattttgttgttatataagatttttttaagattttattttttttatttttgttttttatattatttttttttttttttttattttttagtttgttttttttgttttatttgataggtaaatttgtagatattgttttaggataataattttgtttgatagttaattaattgtgaatagttaaagttaaggtagtttgtattatataaatggaaaattagattttttttttttaagaaataaaattttttttttaagatattgtaatagataatttagtattaaaatttttaattatgttttttttaaattttttggagatatttagtaattagtaaaaggtggttttatttaatttgtataatgtaatttttgtaaatgtattatatattttgtgtagagattattattatggagataatataaatgttggtatagatgttataaaatatttttaatgtttttttgatagatattaaaagtaataagttgtgattttttttaatggaaggtttttaagagaatattttaattattgttattttatgtttttttagtttgttttattgtgtaatttgatatatttttgaatttttttttgaaatatgtttagtaattaataattttattgttattaatgttattgtttttttatttgtgttttttttagttatatttattaggaattgttttttatttttatttttgtattaaatatttagttttttgattatgaattttagtttttttttttgttatttgattatttattttttttatttgtttttagtttatttgatttttttttttaaaaattttttttagaagtattagagtttgtgatgaaaaagttatgttttttgtttttatttagaattaaaataaaatataaaatttgtaagtgatttaattgataagaggtatataaagatttaatttttttttttttgtagggaggatgttatttattatatttaagtttgagagttattaattttaaggagaaataattagaaggttttaggtattttttaaaaatgtggtaattatttagagaggataaagatatttaagaattttagtatatatttatgtaattgtgtatgtttagagggtagatattatttaaatgtaaagaagtatgttgagattgtgagaaatggtattgttatttgggaaattgttattgttggtaaattatagaaatgttgatttttgaaatataaattttgatatttaaaaataaaattaaaaaagagtttataaattaatggttaaaaatagaatggtggtagtgggtaggtgaggaggttgggtataagttttatagaaatggttaaatgtaggtaagaaaagtggtagttgatttttttttttttttttatttgaaaagttgttgttattttttgtagatataattatttggttattttttttagttttttgattttgtgtggaaaagaattagatatataaattaatgtttggattaaattatatgttaatgttaatagttagtaggaagaagtattaataaaagtgattttatggagttttaggagatattattttttgatgattattttttgaatatttttttatttaaatatatgtgtatgattatgtatatttatattattattttttaagaagtaatatagattaattagatatatgttatgttatttatagaagtataggtatatgtttttgtaaataaatatattatgttatttgttaaatttatattttattaggatagatttattttgttttaaagttttttagagtgttttttgtgtatatgtgagtgaatattgaatgtttagttatttaaatttaattttggttttttaggggttttaggtagtattttttagttggtatttttttgagaagagggtttatattgaagattttgttttttgttttattggatataatagttgtgtttattttggttaaaattgattaaagtagttaaaattgtatttaatttttgaagttaatgtattttttatttttggttatggtggaggggaggtattgaattatagagaagaaaaggggtagggtgatttaggttgttttggtgttgtggttttgttttttttaggggaataaatgtgtttagttggagggtaaaggggattgttggattagaggaaggattaggttaattaaagggttttttttaatttttataagtagttagttgaaatataagagggaaaggtggttttaaagtttttgaaaggtgttattaagaaagggattagaaattatatttttatggaggattattggtaggaaagaagtttttttaaatatattgaatattttatttttgtggggaaatttggtgatttattttttttgtgtatatgtaattgatttagtttaaaggtgtatttaaataataataattagtttgaaggagtttaaaggggatatttatatttttgtaggagggttgtttttttagtgatggatggtgaattgggttgtttgggttgttgttgttgttgttatttgttttttggggggttaggggtggtggtgggggtgggggtaggtttgagttggggtttttgagttttttgtttttttgtagtagtttggaggagtttaggttgagtgggaatgtgtttgtgatggttggtgtgtggttttggttgttttttttttttgatggtttttggttttggaggaattggttgtttttgattaaggggttgttgagtaggatttttgtttttttgtttttttttttgttgttgttagggttttgatttttttttttttttttgtttttggggggtttgtggttttttatgtttattttttgttttttttttttgttgtttttgtttttggagttgtttttgttggggtagtagtagttggtttttttgggagatagaaggttttggtggtgtgggtgttgggttagagggggtggtgggggtggtggtggtggtggtggtggggttgggtggtggtgtttggaatttggtttgttgggttgtgggggtagtagtagaagtggtgatggtggttgtggggggtggtggtggtggtggtggtggtgagggtggtgatggtggtggggatgtgtttgggttgagtggggtgtgtttgttgatgttttgtgtagtttggttaggttttttgtgttgtttttgttgtttattggttggaaggtgttggaatggtggtagttgttattgtttgttttgtgtttttttagaaggtgtggatggtggggtgttggaatttgggagtttgtggggttagatttggtggttgtggtttttgttttggtagttgttatagagtttgtgggtggtgtggagtttgtgttgtagtttttgttgttgttgtttgggggtgatttgaagagtgtgttgtgagagttggtgtttttggtaggaggaggtgggttggagtttgggttgttggttattatttgtgggggttgttttggtgggggtgtggttttggtgtttttagtagtattgtttggtttagttaggtttaggaaggtttggtgtagtagggttgggtttttgtttagtgtgtagtttagtgttgagggtggttgaggtgggggttgtaggtaggtgggtattgggagtttgttaggggtttgtggtggttagaatatgtagaagggtggatagaaggtgtttttgtggtttgtgggttagaagaggttggataagttggttttgggtgttgtgtttgtgttgtttgtgtttgtgttttttagggttttagtggtggtatttgtatttttttttttatggtataagttgaaggtggtggttgtggtagggaaggtgtaggggtgtgggaagagtttgttgtagtttgggaatttttgtaggatgtttttgaatgagtttttgttgggtattgggatgattgggtagttgtgtgggtttttggtttttgttttggtatttgtttttgtgtttgtgtttatgtttatgttggttatatagttatttttagtgttgtttttattagtttttgtgttgtttgaagtagtagttatagagaggttggtggttgtggttgagaggttggtggtggttattatggtggttttttgtaaggagttgttgttgttgttgaagtgtggttgtttgtgatgggtgtgtggggtattagttagttttgttaagggtggtggtggtggtggtggtggtgggggtgtatttagtaggtgggggtttagtagatttttgtttttggttattgtggttgtggtggttatggtggttgtttttatagagttgagtgggtggtaggtggggtgtgtgtttggttggggtagtgtgtgtttgtggttgttgttgttgaatatggttttgatgtttttttaggtgaagattagtttgttttggggatttttgttggtgagtttgagatgatggtgttatgagttgaagttggttgtgtttggttgagtgtatttggtgttgggtgtgtggtgggagtggaaaatgaatttgttgggtgagaagtatatgttgtagtagttgtatttgatgtatttggtgtgtgagttgttgtagtgtgtgggaatgaagttgttgtggtagttttaggtgtatttgtgtgatatgttgaaggtgaaattgtttggtagtttgggtggtttgtttttgtttaggaatgatttgtatagatgtttggttttgtgtttggtgattatgttgtagtggtgtgatgagatgggtatggttttggtatgttgtaggatttttagttgtattggtgtgtattgtatatatgtgatgtttagtgttatgtgatggttgtggattttgttgtagttgaagtttttgagtagagtgttggagatttgtgttaggtataggtgtttttgtttgttgattattaatgatatgatgggaatgttgtagaggattatttggtttatttggttgggtttgaggttggtgtgttttggttgtggttggtttagtgtgttgggttggaaggtgtttgatggtgatgttagtaggatgttgttgggttttggtagtggattggaagttat

SEQ ID NO: 112 - DNA, 29262 bp, Artificial Sequence
  chemically treated genomic DNA (Homo sapiens)
atggtttttagtttgttgttagggtttaatgatattttgttggtgttgttgttgagtgttttttagtttgatatgttgagttagttgtggttagggtatgttaattttaaatttaattaggtgggttaggtgattttttatggtatttttattgtgttgttggtgattgatgggtaagagtgtttgtgtttggtgtagatttttaatattttgtttaagaattttagttataatgagatttataattgttgtgtggtattgggtattatgtgtgtgtagtgtatgttggtgtaattggagattttgtggtgtgttggggttatgtttattttattgtgttgttgtggtatgattattaaatgtgaggttgagtgtttgtgtaagttgtttttgggtgaaaataggttgtttaagttgttagataattttgtttttgatgtgttatatgagtgtgtttggggttgttgtggtagttttatttttgtgtgttataatagtttgtgtgttaagtgtattaaatgtagttattgtaatatgtattttttgtttaataagtttattttttatttttattgtatgtttgatgttaagtatatttagttagatgtagttaattttaatttgtggtgttgttattttaagtttattgataagagtttttaggatgagttggtttttgtttgggaggatgttaaggttatgtttaatggtggtagttgtaagtgtgtattgttttagttgggtgtgtattttgtttgttatttgtttagttttgtgaaggtggttgttgtggttgttgtggttgtggtggttggaggtgggggtttgttgggtttttatttgttgggtgtgtttttgttgttgttgttgttattgttgtttttggtagagttggttggtgttttgtatgtttattataagtggttgtgttttgatgatgatgatgattttttgtaggaggttgttgtagtggttgttgttagttttttggttgtagttgttagtttttttgtggttgttgttttgggtggtgtggggattggtgggggtggtgttgggggtggttgtgtggttggtgtgggtgtgggtgtgggtgtgggggtgggtgttggggtaggggttaaaggtttgtgtagttatttagttattttggtgtttagtaagggtttgtttgggggtgttttgtagaagtttttgggttgtggtgggttttttttgtatttttatattttttttgttgtggttgttgtttttagtttgtgttataagaaagaggatgtgggtgttgttgttgaggttttggggggtgtgggtgtaggtggtgtgggtgtggtgtttaaggttggtttgtttggttttttttggtttgtgggttgtaaggatgttttttatttgtttttttgtatgttttggttgttgtggatttttggtgggtttttggtgtttatttatttgtagtttttgttttagttgtttttggtgttaggttgtgtgttaggtgaaagtttggttttgttgtgttaggtttttttggatttggttgagttaggtggtgttgttgggagtgttgaggttgtgtttttgttggggtagtttttgtaggtagtggttaatggtttgggttttggtttatttttttttgttgggggtgttggtttttgtgatgtgttttttgagttgtttttgggtggtagtggtggggattgtagtgtgggttttatgttgtttgtggattttgtggtagttgttggggtaggggttgtggttgttgggtttggttttgtgggtttttgggttttggtgttttattatttgtattttttggaggggtgtaaagtgggtggtggtagttattattattttagtgttttttggttagtgggtggtaaggatgatgtggagagtttggttaagttgtatggggtgttggtgggtgtgttttatttggtttagatgtatttttattattattattatttttattattattattattattattattttttgtagttgttgttgttgtttttgttgttgtttttgtagtttgatgagttgggttttgagtgttattatttggttttgttgttgttgttgttgttgtttttgttgttttttttggtttagtatttgtattattgaggttttttgttttttgggggaattagttgttgttattttagtgaggatagttttgaggatgaggatgatgaggaagaagagtaggaggtggatgtggagggttataagttttttgagggtgaggaagaggaggaaggttgagattttgatgatgatgaggaagaggatgaggagatggaggttttatttggtgattttttagttgggggtggttggtttttttagggttgagggttgttggagaaggggagtagttgggattgtgtgttggttgttgtgggtgtgtttttgtttggtttgaatttttttaggttgttgtaggaagatgggaaatttggggattttggtttggatttgtttttgtttttgttgttgtttttggttttttagaaggtgagtggtggtggtagtagtagtttgggtagtttagtttattatttattattggaggagtagtttttttataaagatgtaaatattttttttaggtttttttaagttaattattattatttaaatgtatttttaggttgaattggttatatatgtgtaggaaagatgaattattagatttttttatagaaatgaaatatttagtgtgtttaggagggttttttttttgttagtggttttttgtaaaaatgtggtttttggttttttttttgataatgttttttaaaggttttggggttgttttttttttttatattttagttggttgtttgtggaagttggaaaagattttttaattgatttggttttttttttaatttaataattttttttgttttttaattgagtatatttgtttttttaaaaggagtaagattataatattggagtagtttgaattattttatttttttttttttttatagtttagtattttttttttattatgattaaaagtaaaaaatgtattggttttaaaagttaaatgtagttttaattgttttaattagttttagttagaatggatataattgttgtgtttagtgaaataaaagataggatttttagtatagattttttttttggaaaagtattaattgaaaagtattatttgggatttttaaaagattaaagttaaatttaaatgattgaatatttagtgtttatttatgtgtgtatagaaaatattttggaggattttagggtgaagtgaatttgttttaatgaagtgtagatttgatagataatatggtgtgtttatttatagaagtatatgtttatgtttttgtaaataatatagtatatatttgattaatttgtattattttttaaaggataatagtgtagatatatgtagttatatatatgtatttaagtaaaaaagtatttaaagaataattgttaaaaaatgatgttttttgaggttttatggagttatttttattgatgtttttttttgttgattgttgatattagtatatggtttgatttgggtattgatttgtatgtttaatttttttttatatagagttagaaaattaaggaaaataattaagtaattgtatttataaaggatgataatagttttttaggtaaaaaaaaaaaaaaaaattagttgttattttttttgtttgtatttaattatttttgtgagatttatgtttagtttttttatttatttattattattattttgtttttaattattgatttgtgggtttttttttggttttgtttttgaatattagagtttatattttaaagattaatatttttatagtttgttaatgatgatagttttttaaataatagtgttattttttataattttagtatatttttttgtatttgaatgatgtttgttttttaaatatatatagttatataaatatatgttaaaatttttagatatttttgttttttttgaatagttgttatatttttggagaatatttagagttttttgattgtttttttttggagttaatagtttttaaatttagatataataagtagtattttttttgtaaaaaaaaaaaaattggatttttgtgtgttttttgttagttggattatttgtagattttgtgttttgttttggttttagataagaataaggagtatagtttttttattatagattttgatgtttttggaggagatttttggagagaaagattaggtaggttgggaataaataagaggaatgaatagttagatgatagggagaggggttgaaatttataattaaaagattgaatatttagtataagggtaaaaataaaaaataatttttagtagatataattaagaaaaatataaatggggaagtagtgatattaatagtaataagattattaattgttgggtatattttagaagaaaatttagaaatatattaggttatataatgaaataggttggaaaagtataaaatgataataattgaaatgtttttttagaaattttttattaaaaaggattatagtttattgtttttaatatttgttagaaagatattaaaggtgttttatgatatttatgttaatatttatattatttttatgataatgatttttatataaaatgtataatatatttataaaaattatattatataaattaaatgaaattattttttattgattgttaaatgtttttaaggggtttgggaaagatgtgattagaagttttgatattaagttgtttattgtagtgttttaaggagagggttttgttttttgggaaaaaggaatttaattttttatttatgtaatgtaaattgttttggttttgattatttatggttaattgattgttaaatgaggttgttattttgaggtaatgtttgtaaatttgtttgttaaatgagatagagagagtaagttaggaagtgagggagagagagagagtggtgtagagagtagaaataaagaaaataggattttaaaggaattttatataatggtaaagtataatgaaaaaggtttttaaatttttgtttttatttttttataaggaaattttttaatatttttaatggtaaaaggtaaatatttattttaatgaaataaaatgttttatgtattatgggaagaaagttttatatattattagatatttttaaattattttatgaatatggtataagtgttgattaatatttgattttggttgatgatgttgaggagttattaataataattttgtagtatattattggttagtggttataagtttatatataatatataatattattattttgtgtattatggtattatttgtttgttagtatattttgaatgtttttattattattatttttatatattaaagttttatattttttgaaaatttataaaattattttttgtaaatttgttttaagtgtttaatgtggtaaaattattaaatgtagatttttttgttatattttaaagttataaaggtaatgatattttttaggaattattttttttttagtatgatattttataaaattgaggtttgaaatggaaagtattgttattaaggaatttttaatggatttgtatgtatttatataaaaaagggtttataattttatttaattgattttgtaatattttgttattttttagatatttttagatagttagttgtttttgtttgtttgatatgtgtagaaattaatagttattggaaataatatatttatgaatatgaaaaaataattttagaaatattttttagttttagattaaatgatatttagtagttttgtatatttaaaaatagatttaaaagtagtttaattttttttatgtttggaaattatagatgggaagtttatatgtattttagtgaatgtaaattatttttggttgttttagttgttgaagtggattggagatttttgttaggtttgttttgtatgattaatgagtatttagagaatttttatttttttttattaagatagataaagtttagaaagaaagtttaaaagtaatgttatattttagtggtattgttaagaatttaatttggaaggattattattttgttttgttttattttatgtatgattttattttgaaagtaagtttttgtaaagtttaaagttgaataaaataagaaaatttttatgtagtaatggttgtgtattttttaaataatatgatttatttagaggtaggatgtgaaatttgttttttatttattagtattaagataagttttagagttgtttgttaaaattagtgtattgtaatttatatatattagttttaatttgtttttgattttttatatttggagatttttattttggagttggttattggtaatattaaagtttaaattattatatatatgtatttaatataaaataatatatttagatagatattaaattttattttaattttgaattttgtttatttattagataaatattaatttttataagtttatttttgttgaattttatttgggtaaaaatttttgtaaatatgttataaaagatggaatatgtgtaatagttttttaaggggtaataatgatttatataaaattatgggataatttaatgtttaaaatattttttataaatttaatgagaaaatttaaattttatagtttgaaatttatttttaggaattttaattttttatattgtatttaatagttaatatttataatttttttaagaagtttttagttaatattttaataattatgtatatttatatttataagtaatttattaataaatatatttgaataaattaagttttttatagagttatattttttttattttatgtatattaatagtttttgtatatttgttaaaaattgaattttttttttttatttttttttgatttggatggaatttgaaaataaatttttggttttaagaggggtttgttttttttatgtttattgatttagtaaattttaataagttattagaattttaagaatgatagttaagtagataaaaattatggtatttattgttgtttgatattaagatggaaatataaatgttaaaaggaagtaagtaaaagtatagttaggattggtgtttatataaaaattttatagtgtttggagtttagggtagtgtggttaatagttatattggtaataatatgtagtgatattattgaaatattgttagtttttattttataataattaatttgatatagatttttagagaaatttgttttatattgatttttttatattatagttttatttttatattattttgggaagtatgtagtaggaggttatataattttattattttgtattgaatgggagataggtgaaatatggaagggataaaaatatattattaaaataagtaaattttaggtgaaggttatattttgttaattttattttggaattttgggttataagaattttattgttatgggttttttttttgtttgtttgtttgttttttgttttttgtttagtatgtggaaatgttttaaatattagtaagtgtttaaagggtttggattgtgtgggatttaatttggtgtattgttagttgttattgtttttagaaaagattagtttgtggtttttagattgaaatatatatttgagaaaattttagattggggtttaagtgatttatgttttggtattaatgtatttatttgtggttagattttgagaatttatttatttggtaaagtgttagaaatttagatgagttaaagagattatgagtgtttgtgattagttgttttggagtggtagtagttaaatgttttatttagtattttttatttattaatgaagatatttttttttatgtaataattgttatttatatgatagtatttatttgtttatttatttatttattttataaatatttttgaatgtttattgtataataagtatttttttagattttgggaatttagaaatagaaattaatatgagtttttgtttttatattgtttttaattaagaggaggagatagattatttaagaaggtagtatgagtattataattgtagtttatataaaaaattatttgataagatttatataattttgtgtttttttagttaatttaatgtttaatttaattattattattggaaaatattaatattttatttttatgtttatatagttataataaaaaaagaatgaaatgtttttttaaattgtttgataagttggtatgtaatttttgatttttataggaattttttatttttgtggtaattataaatatagttaattagaaaatttttatgatttttttttgaataaagatatagatttatatttaattgatttttttaaaaaatttagtttagtaataatattttgttttagttgatattttagtttattattttaattaagtttagtttttttttaatttgttagttttattagtaattattattttttattaattttgaagagattatatttttaaatgatttttttaaaatttttttgttaatggttattaattttatatatagtagatataattttgtataattgagggattaaatatgaagtttttaagtagttaaaattatttaaaagttaggagaatttttatttatagattttttaaaattagatttaagttagatagataagggggatggtagttttattaaaatattatttatttaaaaatataaatgatagtatttttaattgtaattttagagtaaggttttgtatttttattttgaataattttagtgaagttaagtgatttgaaattgaatgtagtggggtaagttggtaagatagtttaaagttattgtaggttaaggaaattaggtaaagtggagttatttttattttttagttttttttattggagaaatgttggtgttattgtagtgtgagtatggttgtatttttttatatgtatagaagttttaaaattaatttgatttttattggtatgattttttagtgtatttaatatgttatggatagatttttgagaatagtaagaagtaattatattttttatgaatatatagtagatgaagtattttgatttattattttattttatttttgaatatgtttatgatttttttaaaaaaaagtaaaaaataagaaaaattttttgaagtatagattagtagatttgagttttaatttttttattaggtgatattaggtaaatttttaaattattttgttttttagttaatgtatttataaaatttgataaaattttttgtttttagtttattagtaatatttagttatgtataatgtattttgaagttttttaatatatggatttaaaattaaatagtttttttattttagatatttgtttatttttatttatgaatgttttttttttattaatgattgttaaaaatatagaatttaaggagatagagaagggtaatgaaaaaatgtttaggaaaaaaaattaaatagtattaatttataagattagttttaaaatttaagagttttttaaatgaatttgagatgtattaattaaagatatttaatttattgatttaagatgtaatgtgtatgtattttgtaataaattttgattatgaattgtaaagtttgttataatttttagtttattataattttattggtattagttaattttgtatttgttttttttttttttattaatggagttaatatttagttagtttattttgtagtatatgttttttagtgatattgattttttttttttttttgttttgtgattttattgaagtgttaaatattataggggaagttatttaatgtagaatttaatattaagaaattagaagtttatattttattgatagaggagaaaattatttaattttgtttttttatataattgattttttaatgatttaatgtaaagtgtttttaaaaatttttttatgttatatgttgtgttgtattttggttatttttaagtgtattagttatattaattgtaggttaattttgattttatttaaattatatttttaagagtattagagatagagaaaataaaaaatttagaaaattttatttagaagtagattataagattaagattaattttaaaatttagagtttatttggaagttaaatatgtatatgtggagtttttgtttaatagtggttaggttttgtgtttgttgttgagtaataggaggatagagttttagtttagtataaaagggtaagaaggtgtattgggagtagtatgtaaagattgtttgtagttttgtatgtaggagatggttttttttttagggtgtgtttttttgtagtagaatatagatatagttagtatatgagtttgtataaattatggaaatatttggatatttgattgaaattataatatttttttttatttagatgttagagtgtatgtgtattttatgtatagatatagttttaaattaaaataattttatttattaaattggttaagtgtagtggtttatgtttgtaattttagtattttgggaggttgaggtaggtggattgtttgaggttaggagtttaagattagtttggttaataaggtaaaattttgtttatattaaaaatataaaaattagttaggtgtggtggtagttatttgtaattttagttatttgggaggttgaggtaggagaattgtttgaatttaggagatgaagataatagtgagttgaaattgtattattgtattttagtttgggtgatagagtaagatttttttttaaaaaaaaaaaaaaaaaaaagaaaagaaaagaaaaaaattatttattaaatttatttgtgagtgtgtaattaaataatatattttttttttttttttttgtagattttttttgtggatagatattttttttttattaaaaaaaattaaaataaaatattttttttaaatattttttatgaagtgttaataatagtattgggaggatataatagtttttttagtgataagtaattatttagtttttggggttgttggttggggttatgtttttaagtgttagttgttggtttaagggagaatttaaaagggagatagttaagataaggagtaggaaattaagtagggatgaaatgattgggggtagtttggtatagtggtttatgtttataattttagtattttggaagaatgaaataggaggattttttgagtttaggagtttgagattagattgggtaatataggtagatttataaaatatttttaaaaattagtttggtatagtggtatagttattttggaggttgaagtgggaggattgtatgagtttagaaggataggttgtagtaagttatgtttatattattgtattttagtttgggtaatagagtaagattttgttttaaaaaaaaaaaaaaaagaaaaagaaaagaaaatggtggggaggagaaagaatgtatttttatagaagggatgggtgaatgttatattttttgatttttatttaaatggtaaaagttttatattgtattttatatatatggtatattttatatgtgtataggatataatatttaaatgtttttatttattgaatttagagtttagtttgagaagagtgataattgtttaattagtttttttttttttatgtttattaatggaataggttatttgattatttgtttggtttttatagttaaatgagttttaaaaatgtataatatttttgttgttggaggttatagtagatatatatgttaattaatatttttaggttatggttaaaatttagtgttgtggttttgtttgtttttgaaagaaatttttaaaatgttagatgagaataaaatttattttttattggagtattataaatttttttagtaaattgaatatataattagtttaatttagttagaatatataaatggattaaaatgtgttttttatatataggaataagttagtgttttaaaatttgttatgataattaaggatttagaatagtgttagttggtattttttttataaagtagaatgaattaaaaagtataataagtatttgtggaatgtatttgtatttttttttaaggtaggggtgattgggattatttgtagggtaggatttttttgtttttagaaagtatattttttagttgaggaagattagattaatattgtaaaatattagaatattaggtataaaggggtagaataaagataataagtatttagaattttagtttaggaagggataaattagtaagatttgtagaagttgaaaaagttttatggaagaaaaatgttttagtttggttaggttgttataaaaaaaaaataatattattgattgggtggtttagataatatttgttttttttagttttggatgttgggaagtttaagattaaggtattggtagatttagtgattggtgagggagttttttttttggtttatagatggttatttttttgttgtgtttttatatggtggaaaagtaggaagggagttttttggggttttttttataagggtattaattttatttataagtggtttgtttttttggtttaattattttttaaagttttttatttttttttttaatattattattttgggggttaggatttaaatatgttaatttggggataagggggatataggtatttaatttttaataagaaaagatttggatggtattttgattttggttgtataagaaagagaggagagggtattttaggatagagaaatgatataaggtagttgtaggtagtagatgtgaaaaataaatgtttgttaggtaataaatataggatgggttaggtgtagtgatttaggtgtataattttagtattttgtgagggtgagatggatggattatatgagtttaggggtttaagattagtttgggtaatatggtgaaattttgtttttataaaaaaaatatagaaaaaaattagttagatatgatggtgtgtatttgtagttttagttatttgggaggttgaggtgagaggattatttgagtttaggaggttgaggttgtagtgagtttggattgtgtgagtgtgttttagtttgggtggtagagtgagaatttgttttaaaaagggagataggatggtttagtaggttggataagaatgggagaatttagagattttgtggggagaattttagaatggagtttttgatggagattatagggagttattgtaggtttttgagtagaggtttgttatgatatttaagagaaagtaattattttagtattttgaaagttagtgttattgaatttgttggttgtttttttttttttttttttttgtttgtttgtgttgtttatatagtttattttttttttatttgttatttattgtttatatttgttttagtatgttattttttttatttattttttttatatttttagtttttaatgatatgtgagggtagaattaagagtgggttggaatatttatttagaatgtggaattattgttgttggaggtttttggagagattaggaaagttgatttttgatattttaggttttttggtttttagttgtatttagtagtgatgtagtttttttgatatggtatgatgttgtttttatttttttggatgagtaggatttttagaaattatgtagattataatgttttgtaaatgtgtatttggaaagttttggtgtggatatttttttaagtagtagttttttttttttttttttttttttgtatttaagttagggttttattttgttatttaggttggagtgtagtggttagtggtgtaatgatgatttattttagttttgatttttagggtttaagtgatttttttatttagattagttggaattagaagagtgtattattatttttagttaatttttgttttttttgtatagatagagttttgttatgttgtgtagtttggtattaaatttttgggtttaagtatttttttttggttttttagagttttgggattataggtgtgagttatggtattgggtttttagtagtagtttttagttatttttatttataggagatgttttatgttttagttatttgttattttttaattttaaattagtttttttttatagttttagatatgtttgaggttgggtttttaagaaatatgttttttttatgtataatttttttttttataattttatattgttagaattgttgtgtttttttttattttttttttttttttttttttttgagatggagttttgttttgttatttagattagaatgtagtggtgtgattttggtttattgtaatttttgttttttgggtttaagtgatttttttattttagttttttaagtagttgggattataggtgtttgttattatgtttagttagtttttgtatttttagtagagatggggttttattatgttggttaggttggttttgaatttttgattttaggtgatttatttgttttagttttttaaagtgttgggattatatatatgagttattatatttggtttattaattttttttttaaaagaggaatttattgtttattttggtagtatatatattaaaattggaataatatagagaagattagtatggtttttgtgtaaggataatatataaatttttgaagtagtttatatttaaaaataaaaggggtgagggaaatataggggataaaaaagtaagtattttagggatgtttttaaatttatttattaattttgaaaaagtaaaatgtagttaatttgaaggaatttttagaaaaattgggagtttattgttaattaaattatgtttatttaatttagtattagattgtttttttttttaattagatggaaattattagtagtaatagtgaataaatatatttaggtttttagaggttatttttaattattattaataatttggtttttatagattagtaatatatgaaaggtaatagtttagtaaaagatatataaaaggtagtggaagtttttgtgttttttatttatttaatatttagttattttaaaaattttttgtaagtgaggtatttgaattttttaagtttaaaattggtagattttatttagaagatgtagtaaaatatttgtttgaaatagatgttaatgtaaattgttaataaaatttttataaagttgatgaaaagataagttttttattaatattattagtagatttgtttgtgtttaatatagtttttatttattagttgtttgtttagtggttttatattaatgtaaagttattaattatgaagtaggaaagaaatgtattttatatattatattttaatttttaaatttaattatttaattgaaatataatataagataaatagtttataaaatatattaatgagttaaaaggaatttggtttataatttgataagattatggtttttagaattgtttatttaggaataaagattttatttaaattatgttttgagtggttgagaaagttgtagaatgatagtgttattatgttttgtagataaatgtagagatatatgtatgtttttttttttttttgtttagatttaatattgtatgttagtatttttgaaatttttatatttttaattggttaattgagattgtatataatatgtatgtatttttattttaaaatattattttttttggtttatttattaataatttgttattaatttttatgttatttttgttttagataatagtgtttttttaggaattgtattgaggtttatatttaaaatgttttatagatattttttttttattttttttttatatggagaagaaagttaaggtattaaggtttaagagtatatttgagtttatagagaggttatgtttaagatgagaatgagaatgaggttataggaatttgatttggatattagagaagatgtttgttattaaggaatttagggatgttaaggatattattaggtttttttttttaatgatgtatatgttttggaatatttgtgtatatttttatagatgtatttatttatatatatatatatatgtataaatatatataaatatattttttatagttattaagtaaaatgtatttgaattgttattgataatattatgttgaaaatttttttgtttgtttatgatattgttataggttagtattttagggagaaattttgtttttttttttgtagaaatttttattttagtaaagaaatttttttgtatttttataagtgtttagggttattatattttggtttttgttgagggaaataaatagtaaggagatttttgatgaattttggtttttgtttattgtaatttagaatttatgattttttggggttttttttagaaataattgtagattttttattgagtgtttattgtatgtttagtgttgtgttaggtattggttatatttaatttttgttgttaagtaatatatggtttattgattgaggaaggggagtaaggaaatagtattatgtttgaggtttgtgtagggaattttggggatatagaggagggatggggtgaaagggagggggatttatgaggttttagagtttttttgtttgttttattatatttttttagatagaaatgaaaagtttgattaaattatgtgagtattgaggatagggggttgaattttttaaaaattttgattgtttgaatgattggattttggtttatttagattagatttgtagatttaatttatgattgtggataaagatatttttttaatttgttattttagttagtatgtaagtgaaataggaataatgatttaatttttatgtgtaatatagttttttttggttgaggaagagtagttaagagatattagtaagtaagttattgtttataaattaatataagttaatttattttgtttttgttttaagttgatttttaatttttttttattttttattttatttatttatttgtttttttgagatagggttatttaggttggagtgtagtagtgtaattatagtttattatagttttaattttttgggtttaagtgatttttttattttagtttttaagttgttggaattataggtgtatattattatatttagttaatttttttatttttgtagggataaggttttgttatgttatttaggttggttttgaatttttggttttaagtaatttttttgttttagttttttaattatagatgtgagttattatatttagttttaagttgattttttttttttttttgagatggagttttgtttttgttgtttaggttggagtgtaaaggtgtgattttagtttattgtaatttttgttttttgggtttaagtgatttttttgttttagttttttgagtagttaggattataggtatgtattattatgtttagttaattttgtattttttatagagatggggtttttttatgttggttaggttggttttgaatttttgatgttaagtgatttgtttgttttggtattttaaagtgttgggattataggtgtgagttattgtgtttggtttaagttgttttttttaaaaaaaaataaattattaattattagggaatttttttaggtttattatttataatttaaagtttttttatattttttttttagtgttttaaattttgatggtttgagaaggttgggtatttgtttttagttttgagaatttttttatttaaattaagttttttttttttaaggagtagtgggattttaattagatttttattagaaattttgattatttagattttttttttgtttattttagtaatttttttttttgtaaagatggatggtggtagggggttggagagggaataattttaagaatttgttttttgggagttgttattataggttaggtaggttttgttttttttttttgtattttttttttgtgttttaggaggattatatgtgaataaatgaggataatatttggttatgaggatttttaattttaggttatattaaataaattgttttgtagatattaaaagaaaatgtaaaggaaaatttatagaattagtttatataaaattaatagtattttttttgtttttttaaaaggtgaatatatataagaaattaatttattttatttattgaaaaaggatgtagaaaatatggggaaaggtaaatgaaagttttaattttgtagaattttttttagttttaaatgattgtggagataataggaggatatttttgttttttattatatttttagtttgataagtaatatatgaataatatatggattattgggtggatataattgagattaatgtatatatattaattaatatatgatattgtaatataatattttaaaataatatattatattgatttatatttatggatttttgtataaaatttattttatgtttatgtaatattttttaaattggtaaaatattttgttttataataataaattgttatatataatagttttttggagagttatttgtaaagattagtaaaatgattttttttttttttattagaagaattttagaaggttttatttgaataaatagatttatggagatgattggaataagaattttaggtgttaaaaggaaatatattttttttagtatttagtaagaaattatttttattttattgtatttatgataattgattatgtttttattattaggtttaagaatgtgattttaagtattaagtgattgtgtaaaatatatatagtttttttatggtttgtttaaatatttataaattttagttttatttaggttttgaattgatttatagataaaattttttttaagaattttttggtatttgtgtatggatatatgtgtatttgtatgtgtatgttgtatgtattttaaaatgtgtgtaaatatataattaaatatgtaaatatatttaaatatttagatatagtttgattatagattttaaaataaaagaattattttgtatttatattttttaaagtagggaaaataagaaaaagttaatttttatttttagattgtttttgatagttttttgatgtttgagatatgtataaatatgaaaatttaaattttaaaggtttagtatatataatttattttattaaatgaaattgttataattttagtagttttagattttttatttatatttaatgttaaaattttattttgaatttagaggtaggagatattgtagtttaaaaattgttagttttatttttagagttttggaattttttaaaattttatggtaggtgtttagatttttaaaatttatttgttttggtttgggttatatttggataaatatattttagtagtgttttttaagttttttggattttgatttagttatattatttttttagagaaaggaaagtgggaaaatagtatgtaaatttattttttttttttttttgagatggagttttgttttgttatttaggttggagtgtagtggtataattttagtttattgtaatttttgttatttgggtttaagtaatttttttgttttagtttttggagtagttggtattataggtatatattattatatttggttaatttttgtatttttagtagaggtagagttttattatattggttaggtaggttttgaatttttgattttaggtgatttgtttattttggttttttaaagtgttgggattataggtatgagttattgtgtttggtttgtaaatttatttttttaattatatatatttaaaattaattttttttagggtatttttttagaatgttagtatgttttttgttattaatttagaaattataaaatttaagttggtaatttttgtgttagatgatttttgtattagtatttggaagatttttaaataattatgataattttaataatgttagtttgaaggtttttatttattagggttttttaaatgtaattattggtataattgaatgatatatttaggtagtatttttgaatagtattaggtttttggtaatatgttaaattaaatttgattagaatatttagtgaggatttaaaatgtagaggtaattgtatgatggaagagaattttgattataaggaatgggagggtttgtaaagtgtgttttttttgtatattttaaaggaggttggagtttatggtattttagttattttgaatttagagaatgtttgtagggttttagaatgagattgaaagaaggagaatggttaatagtttttgatagtataattaggaatattgtgatatttatagttttgagaaaaggagaaatatttaaaatatttttgaaattataagaaataggtgttttgaaaggatttaggattttttaatttttgaaattgtattttaagaaagattgtatagttttttgtttttaatgagaggtattgaatatgtttttttaatagttgatgtttatttaattgttgagtttgtaagtttttgtttttagatttagtagagtgggtttaagttttattgaatttttaatatgtttttttaattttttatgaaatttttgtagttataatttattttattaataaaagttaatttatatttattttaaggaattaagtaatttataataatttatattttttatagtaattgttttgtagtatatgtttttgttaaataaaatgttagaatgttatagtattggttagttttaatttagattttttatttattattttgatgtgtattaatatgtattttttgtgattgttatatgtatgaaatattttaattaaatagtaataaaaaaaattttttttttttttatttgtaatatattttattgattaaggaagtggtatgtgtgtgtttaagtttaaataatgtgtggtttagatatattataaagaggtagttaattttatatggatgaaaatagtaaatgtatattatgtgtttgttaattaaatgtgaggggttgtgaggttaggggatagatttagatttatttagatgaaaaggggaaaattaagatttgtaaagttttattggaaagaagtatagaggaatttttgtgagagttttgtaaagttttttattaggaggtgaatagatgtttatagttattatatttaaaatttagtttatttagagtattgtggatttaggttaggagttgtagtatgtgagaattaagaatttaggtttaaaaattgattagatttgagtttatttttaggttttgttatttgttggttgtatgattttggaaattgtaaaatggggtaaataatttttgttgtttagaagaatgagaggattgaatgagagatttatgtgaagtgttgtgtatatgttgggtataggataagtataattatgatggtgattatgaagtagaaagaagaaaaggagaggaatagtattgagttttagaaaagtatttttaaatttgggtttaaatttttggtttttggttaggtatagtggtttatgtttgtaattttagtattttgggaggttgagttaggtagattatttgaggttaggagtttgagattagtttggttaatatggtgaaattttgtttgtattagaaatataaaaaattagttggtgtggtggtatgaattttagttatttaggaggttgaagtaggagaattatttgaatttgggaggtagaggttgtagtgagttgagattatgttattgttttttagtttggataatatagggagattttgtttttaaaaaaaaaaaaaaaaaaaaaaaaaaaattggttttttgttgtggttttaagggttaatgaggattataggaatggttgtaagaatggagagggtataaataaagataatagagaggaggggtaggtggaggaggaggaggaggaagggtagagggaaaaaggagaaggaggaggaagaggtaggaaaggaggaagaaggaggaagatggaggagaagaaataagtttttatatttggggagtagtagttgggaggaggaagagaaataagtaagtttttgtgtttgttggaatagaggtttttagagttgttttttattgatatttatgtatagttttgatggggaaatttggggaggagaaagtaaggtaaggtaggtatttgttattatagtagaggtagagaagtatggtaggttatagagagggttttaggtgtggatgttgattgttttatttattggttgagtaattttaggaaaattttttgatttttttttaatattataataatattattatttattttttggggttgtggagaggattaaatgagtgaaaggtatgaagtgtttagtatagtgataaatgaatagtaattattattaaatgtgagttgttgttattatatattgttttaaagtttgatgttgatatttttgtagtgattgtatagtaaattagttaatgtaagaaattagaatttgtaaaggtttattgagttgttattatagagggaggaatagggagtgaaatttgttttaatattaaataataagtttaattaatgaattgggtaggatataatagagaggtagggaggatatattaaggaaaaaggagaagttggaattgagtgggagtaggtgtttggggaaatggattaggaggggttttattattattaaggttattttgagatgataataggatggttggttaaatatgttttgtaatgaaaattatgtttagttggataggttaaattattaaaggtaatttttaattttattattttaaatttttttatttatattggtttgattatttttgtagttgtaaatttagaagttatgtttgttattgtattatgtatattttttttagtaattgtattttttttttttttttttttttttagtattttatgtttttttttattatagtatttattgttttgttgtagtttttatttatttttatttttttttattagttattttaaaattttagagtttagttttaaatttgggatttgttaaaggtggtaatgaatggagaaggttgttattagtagggtggtttgtatttttattttttttttttattttagttttttttgtttgttgtttttagttttgtttttttaaaattttagatttggtataaaatttttattttaagaagttagaatgatttgtattgtgtattatggtatatttaagttaattgatttttaaaatttgttataattgtgtgttttttttttaatttttttatttttatttttgttttttttttggtttagttttagttatttggtagattatttttatttttttttttttatttttgtatattgtgtttttttagtttagagtgtttttttttatttaagtttttttttttatttggagtatagttaaagttttgttatatttaagaagtttttttatttttgtagtaggtatgattttttgaagttttgttgtgtttatttttagtattatgagttttttgtgttgattttttttttgttttatttgtgttattttttatttttttaatttatattgtaaatagatttagggaagagttatttagaatgtttttttgttgttatttgtagtatttggtatattgtgggtatgtagtatatttttaataaatgattgataggaatattggggttatatttaaagagattaaaattgataatggaggatggaattggattattgaagatttgtataaaggtgagtatttagggtttatgagttgaatttttagatttgtagatttagtgataaatttatggtatttataagaattgagtggaaaggttagttggttattataggaaagtattaatgaatggggttttatgaaaaatgttagattttatttaaaatgttattattttagatttttataaaaaattgtttttttaaattattgttaagagtttttgttattaaaaataaattatattttatttttttgaatatggttgtttgtattttttatttgtggttattattgaatttattttatgtttagtggttttttttttttttttttttttttttttttttgtagtatattttgggagatgaagtgtagggttggggtggtagggtagattttaaaatattgtatagattaaattttttttagtagaagatggttatgaaaaaaatttttttttaagttttggttgggtatagtggtttaggtttgtaattttagtattttgggaagttgaggtaggaggattgtttgagtttagaagtttgagattagtttgggtaatatattgggattttgtttttatataaatatatatatataaattagttaagtgtggtggtatgtataggtagttttagttattaaggaggtagagatgggaggattatttgaatttaggaggttaaggttgtagtgagttttggttatattagtgtatttaagtttgggtgatagagtaagattttgttttaaaaaaaaaaaagtttaatggttttttaaaaatagagataataaaatgaagatatttgtaaataaattgaattttaaagtttattgtttgtttagaatattttaggtgaattagatgtgaattagatgtattttatgggtttgtttttttatttatggttttaggaatgtaggttagatattttttattgttgtttggaaaattttttggtttttttagttgtttgagtttgtagtgtgtagttttgttgttgtgttggttgatatgttgtattttagtgtttttttttgttatttttttttgtattattattttttaaaaatagttgggttataagtgatttttattatagaagttggtttaatgattttttttatttttaattaaattttgtttttattaatttttagaatatagaaaaaatatggttgggtgtggtggtttattttgtagttttagtattttgggaggttaaggtaggtggattatttgaggttaggagtttgagagtattttggttaatatggtgaaattttatttttattaaaaatataaaaaaagtagttaggtatggtggtgtatgtttgtaattttagttatttgggaggttgaggtaggagaattgtttgaatttaggaggtagaggttgtagtaagttgagattatgttatggtattttagtttgggtgatagagtgagattttgttttaaatttaaaaaaaaaaaaaagaatatagaaaaaattttagatttttgtatgtttgttaattaataatttttatattttaaaagttatatatatttttgttgtggaaaattttaagtatgtagaaataaaaaggaaaggaaataaaaattatttataattttgttatttagagataattaatgttaatattttggagttttagtttttttaaatgtttgttaaatgtttttataaaataaaatgaaatgtaatatataatattttttattttttttttgttttagttaaaatgtgttttgttttgttattatatagtagtgtataaatatattgttatgttggatattaaggtttgtttaagttttagataatggatatttttgtaattaagtttttgtatgtatttattattatttttttaggttaaatttttaaaagtgttgttgtgttaaagggtatgaattttttaaaagttttaatatataattttaagttgttttttagaaagttttaattaatttttgtttttatttttggaatagtatgtattatttttttatttaatttttgttaatttaagaggaaattttggtattttatattattttttttttttttattgttggtgatgttgaatattttttatgtgtttagtatttttttatatgttttgtgaatgtttatttatattttttttttatatttttgttgatgtgtttatttttttattgatttgtataaatttttttatattaaaatgttaattttttgatatgttgtaagtattttttggtttgtattaattatttttaaatgttgattatggtgttttatgtttggggagtttaatttgtttgtaatttattggtatattaaagttttaaatttttgtttgattaaattaattagtttttttttttttagtttttgttttttatgtttttttttattttaattttaaaaaaaaatttgttattattttgaatattttaatggttttttttttgttttttattttaatttaaggaattatattaagtgtattattatagaaaaatgagtatgagttaagttaggattagtttttattattttattttgaattgtttttagttgtttttttttttaaaattagaattttttgtgattttagggaagtgttttagtttggttggttttaggtagttttttttttttaatttattttagtttattattttggttaaaggtattttggatttttagaggtttagaggaaagtttttttttttataaagggagttatgtttgttatgtgttttagtgtttggaattatattgatttttttggaggtttgtgggttatagtgtaggattaagtgttggaattagggtagtttgtggagggttggtttttttgttgttttgtatttttagatttatttttagagtattttgatttggtgaggtggatgttagttttttatatggtattttttgtttaattgttattggtgtaaattaaaattttttttttattttttttgtataggaaagataagtgggtgtatgaagtttaattaaattaatttattttgttattaaaaatttttttttttttttttttttgaggtagagttttattttgttatttagattggagtgtagtggtgtaattttagtttattgtagttttgattttttaggtgatttttttattttagttttttgtgtagttgggattatagttgtgtatttttatgtttagataattttttgtatttttagtagagatagagtttttttatgttttttaggttggttttaaatttttgggtttaagtaatttttttgttttagttttttaaagggttgggattattggtttgagttattatatttggtttgttattaaagtttaaaatgttagagtaagaaaatatttgaaagagtatattattttatatttttgtttttttagataaaggtttgaggttttagagtggggtagttattatagatggtagaattttaatttgttggtggataattttgtgtgtttttattttttgtttattagttagtttttgttgtgtgttaggtattgtggtaggttttaaaaatttttaaagtgtttaaatgtatttttttgttttttaagaatttaattgtttagtagggagatagatggataataattaattatagtatgtattatggatgtattaatataggtatggatagggtgttggagaagtataaaaaaaaatgggtaaataattttggtaggaggggttgtagaattggagaagattttttggaggaggtagtatttggattggattttaaagaaaaggtagttgtttgttgtaagggtaagattatagtaggggtaaaggtatagaggttggaagtataatgtatagttgaggattggagagtggtttggtggttggtgtggtgtaggggattttttttgtgtttttggttgtagttagttgagttatatgtagttttttttttttttttttatgtttttatgtagaatgttgttttttatgtgtttgtttaagtagtttttttttttaatgtttttagaatgaatgatagttttttttttaatttttgtatggtattatatatttttttttattatagtgattttgatattaaaattagaggtgatagtagggattgggtttttttaaaaaaattaattagaatatatgtttggggttggataagaaatttaaatagtatgaaaaggtagaagttgaaaaaaataaaaagaataaagtttttttatttttaagtatttagagttttatgagtggtaaaggatttattattttgaaagtgttggaaagttattggagatttttaagtagggaattaaaggtatttggagagaaagggattggtggtaggtggttagttggaaaatgatttagggatgaggtgtttgtatgtgggaggtaataatggtaaagaggggagaatatgatggtggaatatatagaatttatatattagttggttgtgaagatgaaaggaaaaggagaagaaaagataatgatgaagtttttggtttttttaagttgttgttttattaattataaatttaataagaaattgtgtttattttttttttagtgtagaaaaaggtaaagttagttatgtttatatttttaaaaggattatgtggagaagatgtaatattaaattgtatatttggaagttattttttttttaatgtaataaatatggttaatatgtagaatagtaaaaatattttgtatgataatattttttaaagtttttttttttttagattaaggtaaggtttgtagaaaggtattaggataaagtaggaatataaaataaggttgattttagggtgagagagtttgttgtataggggagttaggttgaagtatttttttttaggagtgagatgagttgtagtgaagttaggtaggtattttttatagatttatattttatttatttggaaggtattatgtgtaggaggggtagtattttttatgtttagttttatttgaggtttgttttattgatttttgttggatttttgaagatagtggaagtttttaatatttgtgatttgtataagtgtgtaaaggttaaagaatatgattgtgtgggatatttttgtgtaattatatgtaagagattatattagatggaatatgagatattgtaaaatataagatatatttagaatttattgtttagtttgattaaattatagagtgttgaaaatattttttaaataagtatataatttgtttatgaaaaaaatatttaaaagtaggggggttgtttatgggattgttaataatgtttttattagttaaattaaaagtagattttatattttagttaatttttttttattttttttttttattagataatttttaggattagatgaaaagggagttagtttattgagaagaaatggtgtaatagttataaattgtaagttgtatttttatttaa

SEQ ID NO: 113 - DNA, 20043 bp, Artificial Sequence
  chemically treated genomic DNA (Homo sapiens)
aggtgtgagttattatatatagttaattgtagggatttttataatttataaaaggaaatagagagaatttgaattttttgtttttatattgtttttatatttttgagggttatttattttttttgttttgttttgttttgagatagggtttggttttgttatttaggttgaaaagtagtggggtgattttagtttatagtaatttttgttttttgtgtttaaattattttgttattttgattttttgagtggttggaattataggtatgtgttattatttttagttgatttttgtatttttttggtagagataggattttattatgttgtttaggttggttttgaatttttggatttgagtgatttatttatttttgttttttaaagtgttgggattataggtgtgagttattgtgtttggtagggttagtagtttttatgaaattttatgtgggagtagaatgttttttgatttgagaagatttttttatagatgttgtatgagtagttattattttttttgtgtgaatgttggatatggttgttatgggtagtatgggatgtaaaagatttattatagtatttgtatttgaagggtttttttttggagtgttgtttgatgtgtgtgtggagtatgttggaggttgtgaatttttgtagagaatagaaatatagaatataagaaaaagttaatttttatgagttggataattaattaaattaaggggtaaattttattgttgtttatttttatggatgaattttgggttttaaggttatagagtatttttggttattattagtagttttaatttgaaaggattttattgatgtgtttttttggttagttttgagaagtattggatgttagaatagtggttttttaatggttagattatttggaggtttagtttgtaaaaaagtagattgtaggttgggtgtagtggtttatatttgtaattttagtattttgggaggttaaggtaggtggattatttgaggttaggagtttgagattagtttggttaatatggtgaaattttatttttattaaaaatataaaaattagttaggtatgttattgtgtatttttaattttagttttttaggaggttgagatgggagaattttttgaatttaggaggtggaggttgtagtaagttgttattgtattattgtattttagtttgggtgatagagtgagattttgtttttaaaaaaaaaaaaaaaaaaaaaaaaaaagtagattgttagtttgggtaatatagtaatattttatttttataaaaagtaaaaaaattatttaggtatggtagtatgtatttgtggttttagttatttggaaagttgaggtgggaggataatttgagttagaaggttaaggttgtagtgagttatgatggtattattgtattttagtttgggtaatagagtaagattttttttttaaaaaaaaaaaaaaaaaaaaaagtagattattaattttatttaagagagtgtgatttaataaatttgatatgagatttaggagtttgtatttaaataagtaattttgatgtatgtgggttttaggattatattttaagataaattttattatagaaagagaagttaatattgattagaagttaatattggttagtgtttttgtataagttagtgttttattggtttttttttttttttttttttttttaatttaaattttttgagatggtttgtaggtttgttttatttgtttgtttgtttgtttgttttgagatagaattttattttattatttaggttggagtgtagtggtataattttggtttattgtaatttttattttttaggtttaagtgattttagtgttttagttttttaagtagttggaattataggtgtattatgatgtttagttaatttttttatttttagtagagatggtgtttttttatgttggttaggttggttttaaatttttgattttaggttgatttatttattttggttttttaaagtgttgggattataggtgtgagttattatgtttagtttagtggtgtttttttatgtttattatttttattttattgatatatattttggaggtattagttgttttaatttggtagatttaatgttttattttttttgagaggtttagaagtagttgtaggatagtttttattttttttatggttttattgtaaaaagtgtaaatgatttagtgattgaaaatataatttatattagtgttttttaataggatttgttgtaataatgggaatatttattatttatgttgtttattttggaaattaatggttatatggagttattgagtatttaaaatgtggttaatgtaatttagggaatggaattttttaattttattttgtttttattaattgaaatagttatatatgattaattgtgaattgtatattgggtagtatagagttattttggtgtaatatgtttaaagtgtggttaatttattgtttttattatagtaatttttaattatatgatttatttttgtttttataattttgtattttgtgtaatatagattagatgttgtttttgtaatgtttttatagaaaattatattagtagtattttttatagattaaagtagtaataatagtagttaatattttagtagtatttttatgttatgttaggtattgttataagagttttatatattttattgatgttatttaataatttggtaaagattattttttttagtttattaatgtggaaattaataggagtttatggatttgtttagggtggtatagttaggtaagtattagaggtaggatttgaaatttggttatgtttgtgtttttaaatattatgaaatagtgatttttttttttttttttttttggagatggagttttattttgttatttaggttggagtgtagtggtataattttgatttattgtaatttttgtttttgggtttaagtgatttttttgttttagttttttaagtagttgggattataggaatgtgttattatgtttagttaatttttgtatttttagtagagatggggttttattatgttggttaggatggttttgaattttttatttttaggtatttgtttattttagttttttaaagtgttgggattatgggtttgagttattatgtttttttattttttttttttttttttgagatagtgttttattttgttatttaggttggagtgtgtagtggtgtaattttggtttattgtaatttttattttttggatttaagtaattttttagttttagttttttaagtagttgggattataggtataagttattgatgtatggaaaatttgattataggtgtgagttattatatttagttagtgtttttaaatattatgtaataggttattaggtttttataaatttggaatgtattttattatatgtattttaaatgttagtttggtaataggaggttggttatatttgattatttttagtaaatttgagtatatttaggggtggaaatgaggattgggttgatatttgattaatatttattaagaatttattaagttaggttttgttttaagtttttatttatagatatttaagtagagtttaggatatattttttagtaagaggttttatttattttagtataatatatatattggtatggtttgtttttagagtggatttgtatgtgtttgtttaggttggaagattgagagaaatattttttatatgtagaatattaaggtgaaaaagaaaaatatagttgaaattatatttttttttaataagtttattttaattttgtgtttatttggggttagagaagaatttttttttaattttttttttttttttttttttgagatgggattttaatttgttatttagattggattgtagtggtataattatggtttattgtagtttggaatttttaggtttaagtgatttttttattttagttttttgagtaattgggattataggtgtgtgttattaagttagttaatttaaaaaatttttttttgtagagatgaggttttattatgttgtttagttttgttttgaattttaatagatttttttgttttggttttttaaagtgttaggattatagttttgagttatggtatttgatttgagagaatttttgttttagatgtggaatgtgggaattgaataggtttgtggtatatggtagaggtttgaattagttttgtttttttaataggtagttgtgtgattatagaatattggttaaatttggaattttagttttttgattttgtttatgggtaaaatatttgttttgttttttttatagagttatgagtaaattataagtattgtgtaattaatttaataattatttatgatttatagagtatttattgtgtgttttatattgttagaaattaggagttagaaattaaggaggggtgatgatgaatatgtaagttaatatggtaatgtatagtagtagattatttgagatgtgttgaatttgtatgaagaggttaatattttgtttatatgttgtgaataattaatattgttttttgattttggtaattttttttgaaattgttttaggaattttatattaggtgaagtaaattattagagaggtgtaagtattgagagtttgttagggataaagtagaaggtttttggttttgatattatttttaaggaaattatattaattaaagagaaaaaataatttttttttgagaaaggtttttgtgtttttataatttttttttaggtatgtttatggggtagaggagagagtaaatttttgtatttgtttatttatttatttttatttatttttgaggtagagttttgttttgttgtttaggttggagtgtagtagtatgattttggtttattgtaatttttgttttttgggtttaagtaattttggtgttttagttttttgagtggttgggattataggtgtgtattatatgtttatttttataaaaaatataaaaaattagttgagtatggtggtatgtatttatagttttagtttagttatttgggaggttgaggttgggtgattgtttgagtgtaggaggtggaggttgtagtgagttgagattatgttattgtattttagtttgggtaatagagtgagattgttttaaaaaaaaaaaaaaaaaaaaagattgtttttttattgtattgtaagagtattttgtttgttgaagggtaagttattattttattattattagtttttttattagttttgttatttattgattttttggttgatagttttttagttttttttttttttttttttttttgagatggagttttgttttgttatttaggttggagtgtggtggtgtgattttggtttattgtaagttttgttttttaggtttatgttatttttttgttttagttttttgagtaggtgggattataggtgtttattattatgtttggttaattttttgtatttttagtagagatggggttttattatgttagttatgatggttttgattttttgattttgtgatttatttgttttggttttttaaagtattgggattaggtgtgagttattatttttggtttttaattttaaagagagtaagtattttatatattttttgtaatttggtttttgtttgataagataatattttttttttttttttgggatggagttttatttttgttatttaggttgtagtgtaatgatatagttttggtttattgtaatttttgtttttggggttgaagtaatttttttgttttaatttttagagtaattggggttataggtgtttgttattatatttggttaatgtttttatatttttagtagagatggggttttgttatgttggttaggttggttttgaatttttggttttaggtgatttgtttattttagttttttaaggtgttgagattataggtgtgagttattgtgtttggttagtaagttataatttatataattaattttgtgttgatgaatatgtagttttaaattttttattattagaatattggatagtttttatttttgttagtttaataagtgagaaatatttttattgttttgatatttttaaatttttttagaattatataaatgtatgataattgtaaatgtatttaaattttataggagtatataatatagtgattaaatatgatttttttagaagtttaggaaggaagggagaaattaggataattttatgatgattttatttttagtttttaaaataggaaaatgggtttaaggttgtagttgtttgaggtagttttgataaggttaatagttaagtaagaatatatttgtgtttaagttttgttttttttttaattaagtttaagggaatattgtatttttttgtagtaagtttagtagagtatttaggtatttggaatggttttgtaatgttattattgattttttgttttataaaatttttggtttattgtagaggttttttgttttttggaaggattgtgtttttattttttttttatttatatttgttaatatatttgtatagatttggaataaggtgtagttttttaggagtatatgttaggtttttttttgtttggaatagtttgatttttttttgtttaattaattttgttattagtataaattagatattttatttgtttttttatatttggtttaaggttatttttgtgtattttttataatttatgtgtttaggtggttgtggatatttttttttttatgtttttttttttgtgggtatttgtattttaatatatgtgtattgttgtgtttatttatgtttgtttgttttgtaatattattttttttttttttagagagggtgtttgttaggtattatagttttgtagttagtatttataaggtaattttttgtgtttaggagtttgggaagggagagagaatgtgatggtgggttatgtgtttttttaatatttattttgtgaggttggtgttttttatgaatatgaagaatgtggatttgaagttggttttgttttttaaaggattgtttgtagagagaatagggaaattttttattgtttttgtttatatagggggtgtatttgaggtgtttatttttgtaatatttgtaggtaaatatttttttatattttttatatttgtagttttttgtagattttgttaaatatagtaaatataatgtttttttagttatttttttttttagtttttttaagaggatatttatttatttatttatttttagttaagaattttttggttattttaagaggaattttttttttttgagatagaattttgttgtattgtttagtttgtagtgtagtggtatgattttggtttattgtaatttttgttttttaggtttaagtgatttttttgttttagttttttaagtagttgggattataggtgtttattattatgtttggttaatttttgtatttttagtagaaatagggttttattatgttggttaggttggtttagaatttttgattttaggtgattagttttttttggttttttaaagtgttaggattatatgtgtgagttattgtgtttggttaagagaattttttttttttttttttttttttttttgagatggagttttgttttgttatttaggttggagtgtaggggtgtgattttggtttattgtaatttttattttttgggtttaagtgatttttttgttttagttttttaagtagttgggattataggtatatattattatgtttagttaatttttgtatttttagtagaggtggggttttattattttggttaggatagttttgattttttgattttgtgatttatttgttttggttttttaaagtgttgggattataggtatgagttattatgtttggttgttaagagaatttttaaaaatttttttattatagaaaaatgtaaatatattaaagtgaaaataatagtgtaataaatttttatgtgttaaatattaagttttgattaatttgtaattaattttgtttttatttatattattgtttgttatagtagattattttaatattaatttattttttgatttaaaaatatttaattgtaatttttagaagatgatatatttttaaaaagtataattgtgattaggtaaagtggtttatgtttataattttagtattttgggaagttgaggtaggtggattatttgaggttaggggtttaaaattagtttggttaatatggtgaaattttgtttgtattaaaaatataaaattagttaggtgtggtggtgtttgtttgtaattttagttatttgggaggttgaggtaggagaattatttgaatttgggaggtgtaggttgtagtgagttaagattgtattattgtattttagtttgggtaataatagtaaaattttattttaaaaaaaaaaaaaaaagtataattgtgttaggtgtagtggtttatgtttataattttaatattttgggaagttgaagtggatagattgtttgagtttaggagtttgagattagtttgggtaatatagtaagattttatttttataaaaaaataataaaaattatttgggtatgatagtatatgtttttagttttagaggttgagatgggaggattatttgagtttggggaagttagttgaggttgtaatgagtagtgattgagttattgtattttagtttgggtaatagagtaatattttgttttgaaaaaaaaaaaaaaatataattataatgttattgttatattgttatatttaaatgattaatttttatttttttatagaaatatatatgtatttatatatgtatatttatatatatatatatatatttgtttaattattttttggttagtttatttaaattaggttttaaataaagtttatatgttgtatatggttgttatgttttttaaatattttaatttataggtttttttttttttttgttttttgatatgtattgttgaagagattattttattagttttatttaagggtagtgtaattttgtagtttttgaatatatttttgtttggtatttgttataaggttaatatattgaggtattgaggttgatttatttttttttgtgtttttaagattagtttgagttataagtttagagtagttattaggatatttgtagtttatagtgttgttttattttatataatttaagggatttttttagtttatattttattatttaaaatttgtggtagattttagagttagaatttttatgtatagagtaaggttgaaagtattttgatttttttaatgtatagggttattgtgatgattaatttaattttaatatttattgagttttattaatgtgagtgatattattattgaatggtagataagattgagaggtaaatttgtttttattaatggaggagggaggaggagagaagttagagagggtgtagttagattttagtaaagtaggttttatgtttaggggtgtttatgtgttgggggaaggtgagagaataggggttatttataaaagtatttttgtagaggatattttggattttagaggataaagtggttttgattatgaatgtattatagagattttattgtttgattttagggaggaagagtagttaagagtgagtttatgtaagagtttgtagatagaaatttttttagtattaggatagtagggaagttgtttattaggggttttgttagttgataattatattttaggtatgtttaataggtggttaaggaaataaattatttattaagtaaataattaggaaggtaattgttagttttaagttgatttattgttttgttttgtttattatttttattgaggtgttaatatttttagaatttttgtgttgggatatttttttggtatagaggtagaatttttattggttagaaatatttggtttttttgttttttggggtgggaagggaagagagggttagtaattttataaatttaagtattaaagtatattaaaatttagaataaagttttaatattgagtttgtttaagaataattatttaggtagaaatgaaatttaattttattttgttttttattttttttaattttattttgttttttattttttttttttttagttttttatatttttatattttaaaatatatatttaaatttttttttttttttataagaggggaatgtttgtatatttaaataatttgtttatatagagtttagattttttttttattatttaagattttaaagaggaaggtttttatttattattaatttttattaaaaagtttttggggaaaaaaatttatttgagaatgtaatggaattttaattttttttttttttttattatatttaaattatttatattaatagattaataaattaatatttatttataattatttttaataaattaagttgtttataagtttttttttattgtttaaaatatatgtttttataataatgttgtaagtattaggtattatttggtttagaattggaatataagtattttatttgtatgttgggtattttttgtatttaattattataagtttttattttgttgtttgttttgattgtttttgatattggtatattattttatgttaataataaataggttgagtattttttttttgaaatgtttgggattagaagtgttttggattttaggttttttttgaattttggaatattttatatatataatgaggtattttggggatggaattaaagtttaaatataaagtttatttatgttttgttttatatatattttatatatatagtttgaaggtaatttttttttttttgagatggaattttgtttggtttgtaatttttgtttttggttttaagtgattatttggttttagttttttgagtagttgagattataggtatttgttattatgtttagttaatttgtttgtatttttagtagagatggggttttattatgtttgttatgttgtttttaaatttttgattttaggtgatttgtttgttttggttttttaaagtgttgggattataggtatgagttattgtgtttggtttatttgaaggtaattttatataatattttaaataattttgtgtatgaaataaagtttgtgttaagtattggtgtgtggaaatttttatttttggtaatatgttagtgtttagttttagattttagagtattttggatttgggattttttgattggagttgttgagtttgtattattatttatttaattattatattattgaatatttaggttgtttgtgattttttatttataagagtggtgttatagttaaaaatttttataagtatagttttttttttttggattattttttgataatagatttttagaagagtattattgagatattaaagttataaatattgtaataatttgatatatatggtgaaaaaattttttaaaaatggttggttatggtgttttatgtttgttattttagaatttagggaggttaaggtgggtggattatttgagtttaggagtttaagattagtttggttaaaatggtgaaattttatttttattaaaaatataaaaattagttgggtgtggtggtgtatgtttgtaattttagttatttgggaggttgaggtaggagaaatgtttgaattttggaggtagaggttgtagtgagtttagattatattattgtattttagtttgggtgatagagtgagattttattttaaaaaataataatgattttttaaaaggataataattattttgttagttattaagtagatattttttttaaatttattgtttattttttttttttttatttttttttttgagatggagttttattttgttatttaggttggagtgtagtggtgttattttagtttattgtaatttttgtttttgggtttaagtgatttttttgttttagttttttgagtagttgggattataggtatgtattattatatttagttaattttttgtattttagtagagatggagttttattatgttggttaggttggttgtgaatttttgattttaggtgatttaattattttggttttttaaagtgttggggttataggtgtgagttattatgtttagtttgttgatttttattttgaaaggagttggtatattttaggaagtgattaataggttttggtttggtgttaagtaggagataatttagagttttatagattatagagaattttaattatttttgtttttatttttatttttatttatatttttatatttatattatttattaaaatatttttggttttaggtattttagaaaaaggatatttaatttgtatgtagatattagaggtgattagaataagtaatagaatgagggtttatgatggtttagtggtggggggaatttagtatggatataagatatttgggggagtaggaagatagtttattaaaataattttgatagttttttattattgggattattatttattattagataaataatgatggttgattgtttattatttattattagataaataatgattgtttattatttattttttaatttttggatatttttttgttttttgttttattgttttttgagtttgattgtttttttttttttttttttatatgtgttttattttattttatttttaagtagttttttttagtttagttttaatgttttttttttagttagtatgtattgggatttagaagtatgagatattaaagtgtttagggttattttttgttttgaagtattttagtttagtaggaaaataggtatgtagatgtaatttattttttttttttttttttttgaaatggaattttgttttgttgtttaggttggtgtgtagtggtgtaattttagtttattgtaagttttttttgttgggtttatgttatttttttgttttagttttttaagtagttgggattataggggtttgttattatgtttggttaatttttttgtatttttagtagagaagaggttttattgtgttagttaggatggttatgattttttgattttgtgatttgtttgttttattttttaaagtgttgggattataggtgtgggttattatgtttgggttattttttttttaaatttgttttttatatatttattatattataataatttgttttttttttttttttttttttttttttggagatggagttttattttgttgtttaggttggagtgtagtggtgtggttttggtatattgtaatttttgttttttgggtttaaatgatttttttgttttagttttttgagtagttggaattataggtgtgtgttattatgttttgttaattttttgtatttttagtagagatgggtttttattatgttagttaggatggttttgattttttgatttggtgatttgtttattttggtattttaaagtgttgggattagaggtgtgagttattgtgtttgatttgagatgaggttttattatgttggttaggttagttttgaagttttgattttaagtgatttgtttatttttgtttttaaaagtgttgagattataggtgtgagttatagtatttggtttgtttttttttttatttataggaatttatatttattttgttttatttattagattagtagtttttaaattttagtgtatatagaaattatttggagagtttatttaatatgtaaattttaaagttttatttttagagtgggttggtggtttttttgttttttgttattggaatgtggattagggattaggattagtagtattttttgtaagttgataaaaatattaaattttgggtttttattttgaatgagaattagtattatgaagatttttgggtatttatttttatattaaagtttgagagtgagagtttagtttagtattttttaaatttgtttgagatttatagtaggtaatgtattttatgtttgatatttattatatttatatatatttatgtgaaatagaaattttataaaataatttttatttttaagggatttttattaatattttttattttattttatatttttttttttttttaatgtgggttttgattattaaattgattttttattttattaagatatgtaattttgtaatttattatttgaaaaatattgttttagtgattagattttagttatattagtttgggtagagatgaattagaaattggtttatttatggtagaagttatatttatttagtatgtttttttttatttttggggtggaaggtagggaagaagaataagtttttataaataggagtatatatttttataaataggagtagtttttgtagttttgggaaattgaggatgtttttttttatttgggtaatttttttttggttagagatatttttggttagttttttgtattagtttttaggagggaggagttgtgtatggagggtttgtggaaaagagtttagtttttttattgggatgtttttattgggtaaggtgagggtgtgtatttatttttagagggtttagatggttgtttttttggttttgtgatttgaaggtttataggaatatttagaaattttttatagtagtttttatattatataaggagtttttggttttgatggatttttttgtagtttttataaaatatatgtttttgatattgtatagtaattaggttttgttttttggggaagtgggtatagttgatataggatatttagttttttgtatttttttttttatttataaagtggtttaaatgattatttttaaagatttaaatgaaataagatatgaagtttgtattgtattttttttttggtttaatttataaaataaattttttaatatttgtaatttaaatattatatttgagtttattaaatatatttttattattttgatttttatgttattataagtagtttataaatttatttatgttaatatagatttgttagtttaaggatatttttttaggtaatgttatatattgggtttgtttgttttttttagagatagagttttattttgttgtttagattggagtgtagtggtttaattataggttatagtagttttgaatttttgggtttaaatgatttttttattttagttttttgagtagttggaattaaaggtatgtattattatgtttggtaaatttttttaaaaaaattttttgtagagatagggttttatttttttttaggttggttttaaatttttgggtttaagtgatttttttattttggttttttaaagtgttagaattataggtgtaagttattgagtttgtttaatgtgatatattttaaaagatttttatttttattatttttttgttttttaaatttttatagtgagtatatgttaattttataagtagaggtaagtgaaataaaaaggttttatttaattttattatttaaatataattgaatagttttatattttatttttagttaggttttatgtatattaatggagttatagattattttttttaaggttgggtttggtggtttatatttgtaatttttgtattttgggaggttaaagtaggtggattatgaggttaggagtttgagattagtttggttaatatggtgaaatttttttttattaaaaatataaaaattagttgggtatggtggtatatgtttgtaattttagttatttggaagattgaggtaagagaattgtttgaatttaggaggtggaggttatagtgagttgagattatgttattgtattttaatttgggtaatagataaaaattttgttttaagaaaaaaaaaataaaaaaaaaaaaataaagaaagattatttttttttttgttgttggtaattttgttgtttttaatattttgttattataaataattttaggattaatatattttatatagttttaattttagattatttttttgtattatatttttagaagtagaaatttagggttaagggattttgaatattttaaggtatttgatatattttgataaatttttttttgtaggtaataaattgtagttttattagtatatttttaatatattattattagattttgaagagtatttggttattttttttttaatttttgattaattttataggtgaataatattgaattttaaaatttgtttttattttttttagtatagttttagtattttataatatttaaagtatttagttttgtttataaatataatataatatattgattttttaaatgtatattttattgttaattttttagattaaaatgatttaaggtatttataaaatatagaatttatgtagaggtgttatttttatggagtaaatattggttgttttttttttttataggtaatataaattatagatatttgttttggatgttttttttttttgattaggatttttttaaaagggtaaaggttaagatttttttggattagttttttgttttatttttagtagtagatttattagaaatagatttattttttatattatagaattgtttttgtaggtttttattttattggtattgattattttattttgaaagggtttaaatttgatttttttggtgataaaattattgtagaatatattaaaatgtgggattttattaaatattgtttgtatgaggtatagatttaggggaaagttgaggtaggaaaagagaatgaggagagttgattttgtattagtttagggaaagaaatttatgtaaggagttttgtttattttttggaagttgaagggagtttttatttagagtttgaggaagagaattagattttagtaaaaggtaggttaaaataattttttattaaaaatgtattataaagtgtttttatgaggtgtttttttttttaattttttaaaggtaattattattttagtttgatatttatttgttgtttttatttttttttgtttattttatatggtttgtttatatatgattttattgtaaataattttatatataattttttatttgagatttagaatagttttatggaagtttatgtaattaattttattaggtaaatttaaggaatttgaggattagaggtaatgtttgattaaggttagtgtagttagttgagttgggattgttaggtgtgaattgttgaaggttgttattgtatgttagtatagaatttgaatttatttgggagtttgttgtaggaattattttttttttggtttttagtttttattaaaattaattttagttatgtagttaagtaagtagggttttagaagtgagtttagaatagttttggtttttatggaggtatttttttttttttgtattttgtagttttagttttatttggaagtgtttttttttggatatttttgtttttgtttgtatttttgtttaatttgatttttaaatggtgtgaattttttttattagagttgtttggggggattaggaggtttgaaattgtatggtgtaggttggttgggtgttttaggttgggagtgattttgtatagaatgaagtgtaggtttttttttgtgaattggaattgagtaggggatttttttttttggttggagggtttgggattattttttgattgtttgttgggtgagtaaggtaataattgggaggtttttagttttttaggtaatagagaagtatttgtagggggtggtggaattaaagtgttaggtttataatatgggttatttttgttgttgttattaatgatttggtggtttagatttttattgttggtatttgtgtatttgtggttgttgtttaggaagggtggtatttttttggggatgtggggaattgggtattatggtggtagtttgttgtattagggtagattgtagagaggttttttttgtaggtttagatttgggtttagtaagggaggtgttatttggaaggggaaggggggtatggtgggggtagtagatgttgtggtttttagttgttggaaaggttggaagtttttttttatggtggttaggttgtttttgtagtgtttataggatgggaaaggtgtgtagtatgtggttaggttttgtgggttgttttttggtgggtagtatattttgttttgaggtatggttttatttggttggggtagagttattttgggattgtatgtttggtggttttgtagaaaagtgggtgttgttgaggatattgtgtgggagttttttggggtttgatttgtgtttttttattagttttttttattttagttagttttagatttaagggaataggataaatgtttttagtttgattttgttagtttgtttttataattaagataaaatgaaaaaatagtaatagaagtaaatataaaaaagttttaaatggaaatttgttgggattttgttttattttaaattttgggttagtgttgttttttttttttttttttaagtattttttttttaagtttggttgtttttttatatttgttttttgtttttggtttttaatttggtttttgtaaaatttattgaagttttttttttttttttttttttagttttataaaatttgttggtagggtttgtgggagttgtggggttttgttaattttggggttgggttgggagttgagtgtaggtggttggagggtaatggagtaagtgatagttttaggtgtttttgggtttttggttgggagggaagagttgaggattttgggttgtattgtgtagatggagatgtgtttttagagtttttgggtaggtttagggattttgtgatttgttttggtttagtggtgtgattttgtgggttttggtggttttgattgtttgtaggggaggggtgtgttatttttggttgttttaggatgtgttgtttgaatttttttttttttgtgggtagtgtttgttatattttttgggttttttggaaattttaattattttattaggattattggggtttggggtagttttttgggagttgtgtggatgagttttggttaggtgggagtgaagagttttggtgattgttagtttttttgtttttgtattgttgggaaaggatggtgttttaatagataggtagtaagtttattgaggttgaagaatgaagtttttttagggttggtgggttttgagattaatgagtttaataagaaaattaagtagggttatgatttagaaattaaagaatatggggttaggagaagaggttagttatgatataggtagtggtttgtttttttttgattttttaaaggtgttttttttttagttttttttgattttagggatttgtaatttgggatttaaagtttttgagagggtagaatgattatttaaaatgaattgtgttagtgagtgttgttgttttttttaatggttttggaagattattgttttgggttttaggtgtgttttgttttgtgtttatttttgatattatttttaagagtgttattgtggagtgggtgttttttggatgttgtggggttatttgggtttggtaggttatttgggtttggtagattttgggtgggttttgagggttgagttaggtttaagagggtgggtggggttgtggggtattgataggttgagggtagggaattgatttggtttatgtagatttttgtgttgttttttttttgtttattgtagttattggttgatttttgatttgttttttgttttttggggttgtttatttaatttattagttttttaaattttttttgggattttagtggtgagtatttgttgttggttttttagggtaggtagtattgttgttttaggtgtgtggagttggggagaaaaaaattgaatatgtgtgttatttagggtttttagataagtttttttgtgtgtatatatattttgaattggagtttagaaggttggatttgtgttttggggttgagttttttattttttgtttttagtttggaagattttagtttgtttgaaggtggtgt

SEQ ID NO: 114 - DNA, 20043 bp, Artificial Sequence
  chemically treated genomic DNA (Homo sapiens)
atgttgtttttgggtaggttgggattttttgaattgggagtggagagtaaggggtttgattttgggatgtgagtttggttttttggattttggtttagggtgtgtgtgtgtgtggaggggtttatttgggggttttgggtagtatatgtgtttggtttttttttttttgattttgtatgtttggagtggtaatattgtttgttttagaaggttagtggtgagtgtttgttattagggttttagggagggtttggaaaattgatgagttaagtgagtgattttaggggatagagggtgagttgagagttggttaatggttgtggtgggtggggagaagatgatgtggggatttgtgtgggttgggttaattttttatttttgatttgttgatgttttgtggttttgtttgtttttttaagtttggtttagtttttagggtttgtttgaagtttattgagtttgagtggtttattgagtttgagtggttttgtagtgtttaggaggtgtttgttttgtggtggtgtttttggaggtggtgttggaggtaggtatgggataggatgtgtttggggtttggggtggtggttttttagggttgttggggagggtggtagtatttgttggtgtagtttgttttggatggttgttttgtttttttgggggttttgaattttaagttgtagatttttgaggttggaggaggttaggagaagggtgtttttggaggattgggaggagatgggttgttgtttgtgttgtggttgatttttttttttgattttgtgttttttaatttttgagttatgattttgtttggtttttttattgggtttattgattttaagatttgttggttttgaaggggttttattttttagttttggtgaatttgttgtttgtttattaaaatgttatttttttttggtggtgtgggggtgggaggattggtagttgttgaggttttttgtttttatttggttagggtttgtttatgtggtttttgaggggttattttaggttttaatagttttggtagaatgattggagtttttgaggaatttggggaatgtggtggatgttgtttgtgagggaaaagaggtttaggtggtgtattttagggtagttaaaagtggtgtgttttttttttgtgggtagttaggattgttaggatttgtggggttatattgttgggttagagtaggttgtggggtttttggatttgtttgggggttttgggagtgtgtttttatttgtgtggtgtgatttagggtttttggttttttttttttagttgagggtttaggagtgtttggagttgttgtttgttttattgttttttgattgtttgtgtttggtttttggtttagttttgaggttggtagggttttgtggtttttatagattttattaatgagttttgtaggattgagaagaaggaaggaaagggaattttaatgggttttgtaggaattgggttgggggttgaaagtggagagtgggtgtgggaaggtggttgggtttagggaaggggtgtttggagagggaaggggaaggtaatattaatttggaatttagagtagggtaggattttggtagatttttgtttggggtttttttgtgtttgtttttattgttgtttttttgttttgttttaattgtgggagtgggttggtgggattggattgggggtgtttattttgtttttttggatttggggttggttggggtggaggaggttggtggggaggtgtgggttggattttgggaagtttttgtgtggtgtttttagtggtgtttgtttttttgtagagttgttgagtgtgtggttttgggatggttttattttggttaagtgaggttgtgttttaggataaggtgtgttatttgttggagagtagtttgtagaatttggttgtgtattatatgttttttttgttttatggatattatagaaatagtttggttattgtggaggaagatttttaatttttttggtagttggaggttgtagtgtttgttgtttttgttatgttttttttttttttttggatggtgttttttttgttgagtttgggtttgggtttatagagggagtttttttatgatttgttttggtatagtaagttgttattgtggtatttaattttttatgtttttagggaagtgttgttttttttgagtagtagttatgagtatgtgggtgttagtagtgaagatttgggttattaaattattggtggtgataatgagagtggtttgtgttgtggatttgatattttaattttattgttttttgtggatgtttttttgttatttgaggggttgaggattttttagttattattttgtttatttagtaagtagttagaggatggttttaaattttttaattaagaagggaagttttttgtttggttttagtttatggaggaggatttgtattttgttttgtatggggttatttttagtttggagtatttagttagtttgtattatgtgattttaggttttttggtttttttagatagttttggtaaagggagtttatattatttgggagttgaattggatgggaatgtaggtgggaatgggagtgtttgggaagaggtgtttttaggtggagttgaggttgtagagtgtgggaagggggaagtatttttatgagagttagggttgttttaggtttatttttgaggttttgtttgtttaattgtatgattaaggttggttttagtgagagttgaggattaagagagaaatggtttttgtagtgaatttttaggtaggtttagattttatgttaatatgtaatgatagtttttagtagtttatatttaatagttttagtttagttagttatgttgattttagttaggtattatttttgatttttaaattttttgaatttgtttaatggggttaattatataaatttttatgaggttgttttgagttttaaatgagaaattgtatatggaattgtttatagtgaaattgtgtatgaatagattatgtaaaatgagtagggaaaaatagaaataataaataaatattaaattgggatgatggttatttttagggaattaaggagggaaatattttataaaagtattttataatgtatttttaatgaaaaattgttttaatttgttttttgttaggatttgatttttttttttaaattttggataaagattttttttaatttttagaaggtaggtaggattttttgtatggatttttttttttgaattaatgtagagttaattttttttattttttttttttgttttggtttttttttaggtttatgttttatgtagatggtgtttggtgaagttttatattttggtgtgttttgtagtagttttattgttaaaggagttaggtttgggtttttttaaggtaaagtggttaatgttagtgaagtgaagatttatggagataattttgtgatgtgggaggtaaatttgtttttggtgggtttgttgttgaaaatggggtgggagattagtttggggaaattttggtttttgtttttttgggagagttttggttagagagagaggatatttagggtagatatttgtggtttgtgttgtttgtaaaaggaaggaatggttagtgtttgttttatgaggatagtatttttgtatgaattttgtgttttgtgggtgttttaagttattttagtttggaagattagtaatggaatatatatttaaagaattaatatgttgtattatatttatagataaaattaaatgttttagatattatagagtgttgaaattatgttaaagagaataaaaataagttttaaaatttaatattatttatttataaaattagttaaggattaaaaaaaaaataattagatattttttaagatttagtgatgatatattagggatatgttagtgggattgtagtttattatttgtaggagaaaatttgttagaatgtattagatattttaaaatgtttaaagttttttgattttgaatttttatttttaggaatatagtataggaaaataatttgaaattgaggttatgtggaatatgttaattttagggttgtttataataataaaatgttggagatagtgaaattgttagtagtagagaaagaagtaatttttttttgtttttttttttttgtttttttttttttgagatggagtttttgtttgttatttaggttggagtgtagtggtgtgattttagtttattgtgatttttattttttgggtttaagtaatttttttgttttagttttttgagtagttaggattataggtatgtgttattatgtttggttaatttttgtatttttagtagagaggggttttattatgttggttaggttggttttgaatttttgattttatgatttgtttgttttggttttttaaagtgtggggattataggtgtgagttattaggtttggttttgaaagaaataatttatagttttattaatatgtatgaaatttaattgggagtaaaatataaaattatttagttgtgtttaagtggtggaattaaataaaatttttttgttttatttatttttgtttatgaaattaatatgtgtttattataggaatttgggaagtaagaaagtgataaaagtaagaattttttagaatatgttatattaggtaggtttagtggtttatatttgtaattttagtattttaggaggttaaggtgggaggattatttgaatttaggagtttgaggttagtttaggaaagagtgaggttttgtttttataaaaaatttttttaaaaaaatttgttaggtgtgatggtgtatgtttttagttttagttatttagggggttaaggtgggaggattatttgagtttaggaatttgaggttattgtgatttgtgattgagttattgtattttagtttgggtaatagagtgagattttgtttttgaaaaaaataaataaatttaatatgtgatattatttagagaggtgtttttaaattaataaatttatgttggtataagtaaatttataaattatttgtaatgatataaaaattagaatgatagaagtgtatttggtggatttaagtgtgatatttaggttataagtattaaaaaatttattttatagattagattaaaaaagaagtataatataaattttatgttttattttatttagatttttgaagatggttatttgagttattttatagatggaaaaggaggtatggggaattggatgttttatgttaattgtgtttgtttttttaaggagtagaatttagttgttgtgtagtgttaagggtatatattttatgagagttgtaaagagatttattagaattaagagttttttgtgtggtatggagattgttatgagaaatttttggatatttttgtgagtttttaggttatagagttggggaagtagttatttgggttttttgaaggtgagtgtatatttttgttttgtttaatgagggtattttagtagaaggattgggtttttttttataaattttttatgtatagttttttttttttaaaggttaatgtagaggattaattgagagtgtttttaattaggggggaattatttaggtgaaggaaagtatttttaattttttaaagttgtggaagttatttttatttataaagatatatatttttatttataaagatttgttttttttttttattttttattttaagagtaaaagaaaatgtattaaatggatgtaatttttattataggtgagttagtttttgatttatttttgtttaggttaatgtagttgaagtttaattattagagtagtgttttttaaatggtgggttgtagagttgtatgttttagtggggtgggaaattaatttagtggttaagatttatattaaaaaaaaaaaaaagtatagagtagaatagaaaatattgatgggaattttttaagagtaaggattgttttgtgaaatttttattttatatgggtatatgtgggtatggtgggtgttaagtataaaatatattgtttattatgggttttaggtaagtttgagaaatattgagttggatttttatttttaaattttaatgtgggaatgaatatttagggatttttatgatgttggtttttatttagggtaggggtttaggatttggtatttttattaatttgtagggagtgttgttggttttggtttttggtttatattttagtagtaaggggtgagggaattattagtttattttaggggtgagattttggaatttgtatgttaaataagttttttaagtgatttttatatatattgaagtttaggaattattaatttagtaggtgggataagataaatgtaaatttttgtaaataagagagaaggtaggttggatattgtggtttatatttgtaattttagtatttttggaggtggagatgggtggattatttgaggttaggattttaagattagtttggttaatatggtaaaattttattttaggttgggtatagtggtttatgtttttaattttagtattttgggatgttgaaatgggtagattattaggttaggagattaagattattttggttaatgtggtgaaaatttgtttttattaaaaatataaaaaattagtggggtgtagtggtatatatttgtagttttagttatttaggaggttgaggtaggagaattatttgaatttaggagatagaggttgtaatatgttaagattgtattattgtattttagtttgggtaatagagtaagattttgtttttaaaaaaaaaaaaagagagagagagaaggtaaattattatgatgtaataaatgtgtaaggagtaggtttaaaaaaaaaatggtttaggtgtggtggtttatgtttgtaattttagtattttgggaggtgaggtgggtggattatgaggttaggagattatagttattttggttaatatggtgaaattttttttttattaaaaatataaaaaaattagttgggtgtggtggtgggtttttgtagttttagttatttgggaggttgaggtaggagaatggtgtgaatttagtagggggagtttgtagtgagttgagattgtgttattgtatattagtttgggtgatagagtgagattttgttttaaaaaaaaaaaaaaaaaaagtaaattgtatttgtatgtttgtttttttgttaggttgagatgttttagggtaggaaataattttaaatattttagtattttgtgtttttggattttagtgtgtattgattgagaggaagatattagaattaagttagaaaaagttgtttagggatgagatgaaataaggtatgtgtaagagggagagagggaaggtaattaggtttagggaatagtgaagtagaaggtaaggaaatgtttagaaattagggggtaaataataagtagttattatttatttaatgataaataatgagtagttagttgttattatttatttaatgataaataatggttttaatgatgaggggttgttaggattgttttggtgaattatttttttatttttttaggtattttatgtttatgttgggttttttttgttattgaattattataagtttttattttgttgtttgttttgattgtttttgatatttgtatataggttgagtattttttttttgaaatgtttgggattagaagtgttttggtgggtggtgtgggtgtgggaatgtaggtgaagataggaatggaggtaaaaatggttgggattttttatgatttgtggagttttaagttgttttttatttagtattaaattaagatttgttggttattttttgaaatgtattaattttttttgaaataaaagttaataggttgggtgtggtggtttatatttgtaattttaatattttgggaggttaaggtggttgggttatttgaggttaggagtttatgattagtttggttaatatggtgaaattttgtttttattaaaatataaaaaattagttgggtgtggtggtgtatgtttgtaattttagttatttaggaggttgagataggagaattgtttgaatttaggagtagaggttgtagtgagttgagatggtgttattgtattttagtttgggtgatagagtgagattttattttaaaaagaaaaatgaaagaaagaaaagtgaataatggatttgagaaaagtatttgtttagtaattggtaagatggttattatttttttgagaaattattattattttttgagatagggttttattttgttatttagattggagtatagtagtgtaatttaggtttattgtaatttttgtttttagggtttaggtattttttttgttttagttttttgagtagttgggattataggtatgtattattatatttagttaatttttgtatttttagtagagatggggttttgttattttggttaggttggttttgaatttttggatttaagtgatttatttattttggtttttttaaattttgggataataggtatgagatattatggttggttatttttgagaaatttttttattgtatgtattaaattattataatgtttgtaattttgatgttttagtaatatttttttggaaatttattattgagaaatagtttaaaaggaaaaagttatgtttatgaaaatttttaattgtggtattatttttgtgagtgaaaaattataaataatttaaatgtttagtagtataataattaagtaaatgatgatataggtttagtagttttaattaagaaattttaaatttaaaatgttttaaaatttgaaattgagtattgatatattgttaaaagtgggaatttttatatattagtatttgatataaattttgttttatgtataaaattatttaaaatattgtgtaaaattatttttaggtgggttaggtatggtggtttatgtttgtaattttagtgttttgggaggttgaggtaggtagattatttgagattaggagtttgagaatagtatgataaatatggtggaattttgtttttattaaaaatataaataaattagttgggtatggtggtagatgtttgtaattttagttatttaggaggttggagttggataattgtttgaaattgggggtggaggttgtagattgagtaagattttgttttaaaaaaaaaaaaattatttttaggttatgtgtataaagtatgtataaaataaaatataaatggattttatatttagattttggttttatttttaagatattttattatgtatatgaaatattttaaagtttgaaaaaaatttgaaatttaaaatatttttggttttaagtattttagaaaaaggatatttaatttatttgttattaatatggaatagtatgttgatattagaggtaattagagtaagtaatagaatgagggtttatgatggttaagtgtaggggatatttagtatgtagataagatatttgtgttttagttttgaattaagtgatatttgatgtttatagtattattatgaggatatatattttggataatggagggaaatttgtaaataatttaatttgttgggaataattataaatgaatgttaatttgttaatttgttaatatgaatggtttggatgtgataaaaaggaaagaaaaattaaaattttattgtatttttaaatgagtttttttttttaaaggttttttggtggggattggtggtaggtgggagtttttttttttaaggttttgagtggtgagggaagggtttagattttatgtgggtgggttatttgaatatgtaagtattttttttttgtgagggagagagggaatttgggtgtgtgttttggggtgtggaggtgtgaagagttagggggagggaggatagggaataagataaaattaggaaggatagggaataagatgaaattaggttttatttttatttaagtggttgtttttaagtgaatttagtattgaaattttattttgaattttggtgtgttttagtgtttaggtttgtaaaattgttgatttttttttttttttttattttaggaagtaggaaggttaggtatttttgattaataaaaattttatttttgtgttaaaaaagtgttttagtatggggattttgagagtattagtattttaatgaaagtgatagatagagtagggtgatggattagtttggggttggtagttgtttttttggttatttatttaatgaatagtttatttttttagttatttgttaaatgtgtttgggatgtagttgttaattaataaagtttttgatggatagtttttttgttgttttgatgttgagaagatttttatttgtagatttttgtatagatttatttttggttgttttttttttttggggttaaataatgagatttttgtggtgtatttatagttaaagttattttattttttgggatttagagtgttttttgtagggatgtttttgtaggtggtttttgtttttttgtttttttttaatatatagatatttttggatgtgggatttgttttgttagagtttagttgtattttttttaattttttttttttttttttttttattgataaaaatagatttattttttagttttgtttgttatttagtgatagtattatttatattggtaagatttggtaagtgttagaattaaattagttattatggtaattttgtgtattagggaagttaagatgtttttaattttattttatatataaagattttagttttggaatttgttataagttttgagtaatgaagtataaattaagaaggttttttgaattgtgtagaatagaatagtattgtgagttgtgggtgttttggtgattgttttgagtttgtaatttaggttgattttaaaggtataaagagaaataggttggttttagtgttttagtgtattaattttgtaataagtgttaggtaggaatgtgtttaagagttgtagggttgtattgtttttaaatggggttggtggaatggtttttttaatagtatatattaaggaataaaagggaaagagagtttataggttaagatatttaagagatatagtaattatatataatatgtagattttgtttgaagtttaatttgaatggattgattagaaagtaattaaataaatatatatgtgtgtatataaatgtgtatatataagtatatatatgtttttataaaagaataagagttaattgtttaggtatgataatgtgataatgatattatggttatgttttttttttttttttgagataaagtgttgttttgttgtttaggttggagtgtagtggtttaattattgtttattgtagttttaattaatttttttaggtttaggtgatttttttattttggtttttgggattaaaggtgtgtgttattatgtttagataatttttattatttttttgtagagatggggttttattatgttgtttaggttggttttaaatttttgggtttaagtgatttgtttattttagttttttagagtgttgggattataggtgtgagttattgtatttggtataattatgtttttttttttttttttgagatggagttttgttgttgttgtttaggttggagtgtagtggtgtaattttggtttattgtaatttgtgttttttaggtttaagtgatttttttgttttagttttttaagtagttgggattataggtaggtattattatgtttggttaattttgtatttttagtatagatgggattttattatgttggttaggttggttttgaatttttgattttaggtgatttatttgttttagttttttaaagtgttgggattataggtgtgagttattttgtttggttataattatgttttttaaaaatatgttattttttaaagattatggttagatgtttttgagttaaaggatgaattagtattaaaataatttattatggtgagtggtgatataaatgaaaataaaattagttatgagttggttaaagtttggtgtttggtatatgagggtttattatattattatttttattttggtatgtttatatttttttgtaataaaaaggtttttaaaaatttttttggtggttgggtatggtggtttatgtttgtaattttagtattttgggaggttgaggtaggtggattataagattaagagattaagattgttttggttaagatggtgaaattttatttttattaaaaatataaaaattagttgggtgtggtggtgtgtgtttgtagttttagttatttgggaggttgaggtaggagaattatttgaatttgggaggtggaggttgtagtgagttgagattatatttttgtattttagtttgggtgatagagtaagattttattttaaaaaaaaaaaaagaaaagaaaagaaaatttttttgattaggtatagtggtttatgtatgtaattttagtattttgggaggttaagaggggttgattatttgaggttaggagttttagattagtttggttaatatgatgaaattttgtttttattaaaaatataaaaattagttaggtgtggtagtgggtatttgtaattttagttatttgggaggttgaggtaggagaattgtttgaatttgggaggtagaggttgtagtgagttaagattgtgttattgtattatagattgggtaatatagtaagattttgttttaaaaaaagaaaattttttttgaagtagttaaagaatttttggttaaaaataaataaataaataaatatttttttgaaggaattagggagggaagtaattgaagagatattgtgtttgttgtgtttgatagagtttgtagaaggttatagatgtgaaagatgtgggaaggtatttatttataaatattatagagataagtattttaagtatattttttgtgtggataagggtgataggaaatttttttgttttttttgtaaatgattttttgagaagtgggattggttttggatttatattttttatgtttatgagaagtattggttttataaggtgagtattaggaggatatatgatttattattatgttttttttttttttttaagtttttgaatatggggagttgttttgtaggtgttagttgtagggttgtgatgtttgatggatattttttttgaaggaggagaggatagtattatggaataggtaggtgtgaataggtatagtgatgtatatgtgttaggatgtaggtatttatagagggaggaatatggaggaaggagtgtttatggttatttggatatgtggattatgaaagatgtatagaggtggttttgagttaagtatagaaggataaatggggtgtttgatttatattggtggtagggttagttgggtaggaaagagttgagttgttttagataggagagagtttggtatgtgtttttggggaattgtgttttgttttaaatttgtgtaggtgtgttgataggtataggtaagaaggaagtgaaggtatggtttttttaaggagtggaaggtttttatagtgggttgaggattttgtaagatagaaaattagtaatgatattatggagttattttaaatatttggatgttttgttaggtttgttgtaaaaaagtataatatttttttgggtttaattaaaaggaggatgaggtttgggtatagatgtatttttgtttgattgttggttttgttggaattattttaggtagttatgattttgagtttatttttttgttttgaaaattgagaataaaattattataaaattgttttaatttttttttttttttttaagtttttggaaaagttatgtttaattattatattatatatttttataaaatttgaatatatttatagttattatgtatttgtgtaattttaaaaggatttaaaaatattaggatggtgaaggtattttttgtttattagattggtaaaagtgaaaattatttagtattttgatagtgaaaagtttgagattgtatgtttattaatataaaattgattatataaattatggtttattggttaggtgtagtggtttatgtttgtaattttagtattttgggaggttgaggtgggtagattatttgaggttaggagtttgagattagtttggttaatatggtgaaattttatttttattaaaaatataaaaatattagttgggtgtggtggtaggtatttgtagttttagttattttagaggttgaggtaggagaattgttttaattttagaggtggaggttgtagtgagttgagattgtgttattgtattgtagtttgggtggtaggagtgagattttattttaaaaaaaaaaaaaaaatattgttttattaagtaaaaattaaattatagaagatgtatagaatgtttgttttttttgaaattggaggttgggagtggtggtttatgtttaattttagtattttgggaggttgagataggtggattatgaggttaggagattaagattattgtggttaatatggtgaaattttatttttattaaaaatataaaaaattagttaggtgtggtggtgggtatttgtagttttatttatttgggaggttgaggtaggagaatggtgtgaatttgggaggtggagtttgtagtgagttgagattgtgttattgtattttagtttgggtgatagagtgagattttgttttaaaaaaaaaaaaaaagaaaagaaattggagggttgttaattaggaggttagtagatgataggattgatgaggaagttggtgatagtgagatgatggtttattttttaatagatgaggtgtttttatagtatagtggaggaataatttttttttttttttttttttttgagatagttttattttgttgtttaggttagagtataatggtatgattttagtttattgtaatttttattttttatgtttaaataattatttaattttagttttttaagtagttgagttgaggttataagtgtatgttattatgtttagttaattttttgtattttttgtagagatgggtatgtggtgtgtatttgtggttttagttatttgggaggttgagatattagaattgtttaaatttaggaggtagaggttgtggtgggttgagattatgttattgtattttagtttgggtaatagagtgaggttttgttttaaaaataaataaaaataaataaataaataaatataaagatttgtttttttttttgttttataagtatgtttggaaagaggttgtgaaagtatagaaattttttttagagaaaaattgttttttttttttagttagtgtaatttttttaaaagtgatgttaaaattaaaggttttttgttttatttttggtaaatttttggtgtttgtatttttttggtagtttattttatttggtgtagaatttttgagatagttttgagaggagttgttagggttaagaaataatattaattatttatagtgtgtgaataaaatattaatttttttatgtaagtttaatatgttttagataatttgttattgtgtattattatgttggtttatatgtttattgttatttttttttgatttttagtttttggtttttagtagtgtggagtatatagtaggtattttgtaagttgtagataattgttgagttaattgtatagtatttgtagtttatttatagttttgtgaggaaggtagagtaggtattttgtttatgagtaagattgggaaattaagattttagatttaattaatgttttgtagttatatagttatttgttgagagagtaggattaatttaggtttttgttatatattataaatttgtttagtttttatattttatatttgaagtaagagtttttttaggttgggtgttgtggtttaaggttataattttagtattttgggaggttaaggtaggaggatttgttggagtttaagataaggttgggtaatatagtgagattttatttttataaaaaaaaattttttaagttagttggtttagtggtatgtatttgtagttttagttatttaggaggttgaggtgggaggattgtttgagtttgggagttttaggttgtagtgaattgtgattgtgttattgtagtttagtttgggtaataaattgagattttgttttaaaaaaaaaaaaaagaaaaaaattggaaaagagtttttttttaattttaggtaaatgtaaggttgaaatggatttgttagaggaaggtgtgattttaattatattttttttttttattttagtgttttatatgtgggaaatgttttttttaattttttagtttaaataaatatatgtgagtttattttggagatagattatattagtgtgtgtattgtattaaggtaaatggaattttttattaagggatgtgttttgagttttgtttgagtgtttatggataagaatttgaaataaagtttggtttaatgagtttttggtaaatgttagttaaatattagtttagtttttatttttatttttaaatatgtttaagtttgttaaagatggttaaatataattaattttttattgttaagttggtatttagagtatatgtaataaaatatattttaaatttatggggatttgatgatttattatatagtatttaaaagtattagttgagtgtggtggtttatatttataattaaattttttatgtattggtggtttatgtttgtagttttagttatttgggaggttgaggttggagaattgtttgagtttaggaagtggaggttgtagtgagttaagattgtattattgtatattttagtttgggtgatagagtgagatattgttttaaaaaaaaaaggagggggtggggaggtgtggtggtttaagtttgtaattttagtattttgggaggttgaggtgggtaggtgtttggagatagggagtttgagattattttggttagtatggtgaaattttatttttattaaaaatataaaaattagttgggtatggtggtatgtttttgtaattttagttatttgggaggttgaggtaggagaattatttgaatttagaggtagaggttgtagtgagttaagattgtgttattgtattttagtttgagtggtaaagtgaaattttgtttttaaaaaaaaaaaaaaaaaaaaattattattttatagtatttaagaatataaatatggttaagttttaaattttgtttttggtgtttatttagttgtgttattttgagtaagtttatgaatttttgttagtttttatattgataaattggggagaatagtttttattaagttgttggataatattagtaaagtatataaaatttttgtaatagtgtttggtataatataaaagtattattggaatgttaattgttattattattattttaatttgtgaaggatgttattgatgtaattttttataggagtattgtagaagtggtatttagtttatgttatatagaatatagagttgtaaaaatagagatgaattatgtggttagaggttgttataatagaaataataggttgattatgttttagatatattatattaaaatagttttatgttatttaatgtgtagtttgtggttaattatatgtggttattttaattagtaaagatgaagtaaagttgaaaaattttgttttttaggttgtattagttatattttaagtgtttaatggttttatgtggttattgatttttaagatggatagtgtgggtaatgaatatttttattattgtagtaagttttgttggaaagtattggtatagattatgtttttagttattgagttatttatgttttttatagtaaagttgtaaaaggagtagaggttgttttatagttatttttaagttttttaaaaggaataaaatattgagtttattagattagagtaattaatatttttaaagtgtgtgttaatagaatgaaaataatgggtatagaaaaatattattgagttgggtgtggtggtttatatttgtaattttagtattttgagaggttaaggtgggtggattaatttgaggttaggagtttgaaattagtttggttgatatggagaaatattatttttattaaaaatagaaaaattagttgggtattatagtgtatttgtaattttagttatttgggaggttgaggtattagaattgtttgaatttgggaggtggaggttgtagtgagttaagattgtgttattgtattttaatttgggtgatggagtgagattttgttttaaaataaataaataaataaataaataaaataaatttataaattattttaaaaagtttaaattaaaaagaagaagaagaagaagaaaattagtaaggtattgatttatgtaaagatattggttgatattagtttttggttgatattagtttttttttttgtaatgaggtttgttttgaagtatgattttaggatttatatgtattagaattgtttgtttaaatgtaggtttttgggttttatgttagatttattgggttatatttttttgggtggggttggtaatttgtttttttttttttttttttttttaaagagagggttttgttttgttatttaggttggagtgtagtggtgttattataatttattgtagttttgattttttggtttaagttatttttttattttagttttttaaatagttgggattataggtatatgttattatgtttaggtaatttttttattttttgtagaggtgaggtattgttatgttgtttaggttggtagtttgttttttttttttttttttttttttttttggagatagagttttattttgttatttaggttggagtatagtggtgtaataatggtttattgtaatttttgttttttgggtttaagaaatttttttattttagttttttgagaagttgggattaaaggtgtatgatagtatgtttgattaatttttgtatttttagtagagatggggttttattatgttggttaggttggttttgaatttttgattttaggtgatttatttgttttggttttttaaagtgttgggattataggtgtgaattattgtgtttagtttgtaatttgtttttttataaattggatttttagataatttagttattgaagaattattgttttaatatttagtgttttttaaaattagttagaaggatatattagtggagtttttttggattaaggttattgatgatgattaggagtgttttatggttttaaaatttaaggtttgtttataaggatgagtaatagtgaaatttattttttagtttaattggttgtttagtttgtggaagttgatttttttttgtgttttgtatttttgttttttgtagaggtttatagtttttagtatattttgtatatatattaggtagtattttggggagaagttttttaaatgtaagtattgtggtaaattttttgtattttatgttgtttatgatagttatgtttggtgtttatataaggaggatgatggttgtttatgtagtatttgtgggaaaatttttttagattaagaaatattttatttttatatgaagttttatgaagattattagttttgttaggtataatgatttatgtttgtaattttagtattttgggaggtagaggtgggtggattatttaagtttaggagtttgagattagtttgggtaatatggtgaaattttgtttttattaaaaaaatataaaaattagttgggggtggtggtatatgtttgtggttttagttatttaggaggttgaggtggtaggatggtttgagtataggagatggaggttgttgtgagttgagattgttttattgttttttaatttgggtgatagaattagattttgttttaaaataaaataaaataaaaaaaatgagtagtttttaagagtgtggagataatgtaaaaataagagatttggattttttttatttttttttatgggttatagaagtttttgtagttggttgtgtgtggtggtttatgttt

SEQ ID NO: 115 - DNA, 7201 bp, Artificial Sequence
  chemically treated genomic DNA (Homo sapiens)
gttagtggtgttgtgttgaatgtaattgtgtgtgtttgttgggtgagttagtgatttgagttaggtgggggtggtttgattttttttgtttagtttgggttagaggaagttgaaagtggttttagtaaggtgaggtgtttgaggttgtagaagattgagtagaattttgtagagtttgggatgtgttgggttaggttgttgaggatttgattggttttttttttttttttttttatttattttttttttttttttttattatttagtgggtttgttttgggtttttagttattagtttttgattttgtgtttgagggtagtgattttgatttttgtttgtatgtatagttagtagttttagtgttagattttaaagttggatattttttaattgggttattagtttgggttttaaagttttggtgagtgttgtgatgttgtttggggtgttagggagggtaaagggtgtgaattattttttattttttttgtgtgatttggatgttttattttaaatatataaattaaggtttaagtatagagagtttatgtggtttagttttgtgtattttaggtattattaaggttggatgggtgtttgtattgtgttttttgtttttatgggatgttaatgataataaaattttggtttttagttgagtattttggggaggggggtgagaggatttttttaagtttaaggaggggtttttgtggtggtgtaggttgatgagaggtatttgggaagtatagagtggtattttagtgagtttgaagggttatttgtaattaaaggaaaattgtttttttatggatagttttatatgtattatggttatattagttgagtatggggaaatttgataagtggtttggggttgtttatttggatataatattttgtgtgtgtgtgataagtgagttatttagggatttgtttggaaagtttgtgtaaagttagagagggttatggttaaaggttaggtatttatagagtatttagaattaataaaataaaatttttgttgggttgtggatttttgggggttttggagatataggaaaggtatgtgtggtttggaagtgagggatatgtaatgagaataggatgatttaagtggttggaggtgggtagattaggagttttgggttggaggtttagggatggtttttgatggtggttggtgggtttttggatttttttgtgtttttttagagtgagggttgttaggtttaggttttagtgaagttttgagtgttatggttgatttgtaggttggttttgtggttggggattgggagattgatgttgagagtttggagttggaagaggatgtttgtggggtgttgtggtttatgttttttgggtttagtttgttgttggtggatggggattgtgaggatgatgaagatgatgatggggtggatgaagatgtggaagaagagggtgatggtgaggaggtaggtgtgttttttgggatgtttggttagttggagtagtgggggggattgtagttgaggttgttgtttgtgttttaggttttatttgttggtattggtttttgagagtgttgtatttttgtgggtggtggtgtggagttgtgtaagttgagttgtatgtttaagtgtgtgtgttgttgtaattatggtgtggtgttttgtttgaagggttataagtgtttttgttgttggtgtgattgttagtgtgttaattgtttgttggtggtggagtggtagtgtgttatggttgtttaggtggtgttttggaggtagtaggttattgaggtgtgtatttgtttggtttgggtgttttaggttatagtggaggtgggggagttggaggggagtggggtggttgtttatattttttgtgtttagggttttgtggtgtttggtattttttaggaaggatggtaagaatgtttttttgtttgtattggtgagtagggttgggagggaaaaagtaggtatttttggggaatttgggaaatgtttttgttttaaaaagtaggtagagaggttttgaaagtgtttaggtttatttggaatattgtgagaaaattaatgtttttatttttttgtattttaaagtgtatttttgtggtgttgagggtgggggtttggggggagagtggttgatttatagtatggtgtgtagttttaggtttgttattgttgtattggtgatgatggagaaaaagaattatgtagtatgtatgtgtttggtgttttagttgttatttggatgtttgagatatttagaatatttattttatggatgagatataaaatgtatgagaaattagatgtttgtagtttaaggttattaatttgaagttattgtttttgtaaattatttaagagtaaggggagggtttttgttgttttttattggaggattttagttgtgaggagagttagggttttttttttgagagatgtttttgaatttttgattttgtatttgtttttatgtgtgtttggatagggagagtttagtgagtgaggttttatagggtttttttttagatttaggattagggaagatttttaattttattttttggtggagaggagttggggagtggattgttagatatattgaaggtagtaattttattggaaagttttttgagggtttaggagagtgtgttggatgttatgggtatttggttttgggtttggtttttttttgtgttttgtatgggttattgtttgttttgtgtttttatgtgttttttgtagtatatgttgggtaggatgtgggtgtgggagggtttagaattttattagttggtgggataggtgattgtagaggtgagggtgggtgtttgtaaagtgtaaatttggagtttgtagttggatttaggagatttttatttttttatttttttattattttattttgtttgttttgttatagggagaaatttgtttggttttattgttttatagtaggttttgggtattttttatttgataggtgggtttttaggatttagtttggttgtaattattttttgaggttgggtgtttttttgaaagggattttatttttttatttttttttgggatgtttttttatttttggttataggtttgtgtatatttagagtgattagagtttagagtgattatgttgtggaaagtaggggatttagtttattagttgaggttttagttttttgttttaggattaaggggtgttgatattaatttgtttgtaattattttttatatggaatgggaaaatttaatatatttagaagggggagagtttttagaagatttatggatattttgtttttttttttttttgtttttatttttttttagggtattattgatgatgttttttgtgtttataggataagaaggggttttttgggaaatagaataattttgagtgtaaagttgtgtattagaggtaagttagagtttttagtttgttggttaaaagtattttagaaggtaaagtaataaaattattttttagttttttaaatagagttgagtgatttttattaattagtataaagtgtgtttattaatttgtgaaagagttatttaaagggaaagtattttttattagaaaggttttgtttaggtgtttgttgagtttgtatgttaaaattgaatttgtatggagaagattagtatggtttgggaattagaaagtttttttttaggaaggaaattgttatttgggaaaatgaattttatatattttttgaggtttttgttattattagttgaagaatttttattatttggttgtttgtttagtggttaattggttaatgtggagtgtatgtgaaatttattttgtatgagggatgtataaagatatattgttaagtgattttggagtagatgttttggaaggaaataaataatttaaataaagtaaaataaaataatataattatgtttattttttttagttgtgggagttgaatagatgaagttaagtgaggagtttaatagttgtttgtaattagtaaagttgtttagtttggaagtttaattttagattttgtttttttttattgtatttttttttttttttttggattatttggataatttttattattttaaattttatttttattattttttgatagttaaggttatagaatttgaaaaaggttttgaatttagtaagtgaagtggaggttgaatgtgaatagtgtgaaatttttagttttttgtttttatgtttttatttttgtgaaagtttgggggtatattaattttttttaaaatattatttatttttaaaagtatttttatttgggtatggaatttatttattgattttaataatatattgattatttttaattgtttttttttaaatttttaaaaatttaaataagggataattaatgtttgttttaattattgttattttatgaaatttaggttgaaagtaaataaaaatttttaagtagatatttggattttgttttttttttgtgtagtttttgaattttgttggttttggataggtttgtgtgtgttttataaaaatttttaagtagatatttggattttgttttttttttgtgtagtttttgaattttgttggttttggataggttttgaagtttgtgtgtgttttattatgtgttgtatatttttgattatagagtggttttttatgaattaaaaatgaatttggttataaattggataaatagatttataataatagggttatattgataaattgagattatgtaaagtaatttgtgaagtttgaggattaaatggaatagtaaatttaattaaataattttttggtaaaaatttattatagaaatgtaaatattaatttttaaattttattttatttgtaaatgagtataatgggtttgttattatgtaaatataaatataataatggatgttttaaataaatatgatagaggtgagtgtttgggggtgatgaaatattttaagtattttatgtttttaggaattttatttatgttatattaatttttgtatttgagtttgtttttatttgtgtgatgatttagtttgtgttttaatgattgtttgtttaattattttggtatttggttaaaatgattagagtttgggaagaatgttttagaatagttatttttgatagagtagggaatattttttgttttttttgagttttgttttattttattttatttttttttgtagtggtattaggggaaggggtttggttaaattgtttattgtagagtgtgtttgattagttaatagttttttttaattttttatgtttttttatttttttaagttttttttttttttttttatttgttaattttttttaattttttttttttttttttttttttagttttttttggattattttatagttattatgtgtatataatgaattatttttagaaaataaaagtgatattagttttaggtatagatatattttttaataatgaaaaaagatgatatggataataataaaatattgattgatataagataaatagttttgttttttaatgtgtagggggtttgggaagaatattaaaattttaattaataaagtatgtttgttgaagtaagtaagtaaataaatttataataattataataagtaataagaataagaataataataagaagaagttgtagtatggatattttttatttttttaggaaatttttttaaatttaatttgtatttttgtatttgtataaaaatattagtgagatggaattgtaaataattgttttgttgatttgtagtgttgttgttattttttgggtttttatatttttattttgtagatgttaattttttttatgtgtaatttttgttttttgtaggttattgttttattttagtggagatttatgtaggagggattttttttttattttttttagttagtgataggatgaggaaaagaagagtttttgttgataaagagttggagaatattatgttggagagagaatataaagaaagggagatgttggaaattttttaagttgttgttttgtttttgtttaattgtatggtgtttggatttgattataatttttataaaagtgtttatagttttagtttagtggaattattaagtaaggatttttgtaattttttgtttatttgttttgatttaattatgtagtatttagggtttgggaatatggaattaattttttttaatgttagtgtggttataatttatagatagtattttttgtttttaagatttttagtttggtttaagtgtggttttattagtgatatttttttttattagtaatgtttgttaaatgttattattttagtttaagttttgaagtttggggttagttgggatttgaagggagtatgagtttaggatggatttagtgtagagtaggatatgatgttattgaaattggaaggttttttggtgttgttttatatttttgagatttagattatgagaagtgatttttagggttattaggttgttttagagaggtttgtgttttttttattttgatggaattttttttttattgttgatatggattttttggtagtttaagggtatgttttaatgaagattagtaaagaaaatattaggtattttttgttatttagatataatttattttatttattattttagtaaatatttattgataaattgggttttgagttgaaaatattatttgttaaagaggtttttgaagagatttttaagaaatatagagagtgtttagttaaggataattagaagtatatatttataatagatagatgtgtaaaagatttttttgtagttaaataagttggaataaaatttttggtgaatgaattattgttattttttgttgagtttatttttaagaggtttttatttgttattatttgtgttttttagtgaaaggttgtttaaatagaaagttggattttttgtagttttagagtattatagttatttgttattttttttaaaagttaagatgtttgtgtaaagaaatttttaatgtaaagatgatgattttgaaaaattttatatatttttaatatgtatgtatttttttttattatatatatttaaatttatagatggaaattgtttaatgtgtaaattgttaagtattatattttatatagtattttaaaaagtaataaaattgatattgtttttttaaagatttaata

SEQ ID NO: 116 - DNA, 7201 bp, Artificial Sequence
  chemically treated genomic DNA (Homo sapiens)
tattgggtttttgagaagatagtgttaattttattgttttttgaaatgttgtgtaaagtgtggtatttaataatttgtatattgggtaatttttatttgtaagtttaaatatatgtgataagaaaaagtatatgtatattaggaatatataaaattttttaaaattattatttttatattagaaatttttttatataaatattttaatttttaaaaaaagtagtaaatggttataatgttttaagattgtagaaaatttagttttttgtttaagtagttttttattgagagatatgagtgatggtagatgaaggttttttaagaatagatttaatagaaaatgatagtggtttatttattgagagttttgttttaatttgtttggttataaaaaggttttttgtatatttatttattgtaaatgtgtatttttggttgtttttaattaaatattttttgtgttttttaggggtttttttaaaggtttttttgataaatggtgtttttaatttaggatttgatttgttagtaagtgtttgttggaataatgagtggaatggattatgtttaagtggtagagggtgtttggtgttttttttgttgatttttgttaagatatgtttttgagttgttagggagtttgtgttaataatgggagagaaattttgttggggtggggagaatgtggatttttttgggatagtttgatgattttgaaggttattttttgtggtttggattttaggagtgtgaggtagtattagggaattttttaattttgatggtattatgttttgttttgtattgagtttattttggatttgtgttttttttaagttttagttggttttaggttttagggtttgaattgaggtggtggtatttagtaggtattgttggtagaggagggtgttgttaatggggttatatttgggttaaattaaaaattttgaggataagggatattgtttataagttgtggttatgttgatattagaagaaattagttttatatttttagattttgaatattgtatggttaaattaaggtaggtgggtaaaaaattatagaagtttttgtttggtggttttattgggttggggttgtaggtatttttgtaggaattgtagttaggtttaggtattatgtggttgggtagaaatagagtagtagtttgagaagtttttaatatttttttttttttatattttttttttagtataatgttttttaattttttattagtaaaggttttttttttttttattttgttattaattgggggaggtagagggaaggttttttttatataagtttttgttggaatggggtgatagtttataagaagtaaagattgtatatgaaagagattaatatttatggaataaaaatgtggaaatttagaaggtaatagtaatattatagattagtagaataattatttatagttttattttattgatatttttatatagatgtaaaagtatagattaggtttgaaagagttttttgggagggtgaaagatatttatattgtaatttttttttgttgttgtttttgtttttgttgtttgttgtggttgttatggatttgtttgtttgtttgttttaatagatatattttattgattaaaattttaatattttttttaggttttttatgtattaagagataagattatttattttgtattaattaatgttttattattatttatgttatttttttttattattaaaaaatatatttatatttagagttgatgttatttttattttttaaagatggtttattatgtatatataatagttgtagaataatttaaggagaattaggaaaaaagagaaagaaagaaagttaaaggagattagtgagtagaaaaagaaaaaaaaggtttaagaaaatagagaagtatagaaaattgaaaagagttgttaattagttaaatatattttatagtgaataatttaattaggtttttttttttgatattattataaaaaaaaataaaataaaataaaataaaatttaaaaaaggtggggagtattttttgttttattgaaaataattgttttgaaatattttttttaagttttaattattttggttggatattaaaatggttgaataagtaattattaaaatataggttaagttattgtatgaataggagtaaatttaaatataaagattagtgtaatataaatagaatttttggaggtataaaatatttggagtattttattatttttaagtatttatttttgttatatttgtttgaagtatttattgttatatttgtgtttatatagtgataaatttattatatttatttgtaaataaaataaaatttgaaaattaatgtttatatttttatgataagtttttgttaggaagttatttagttgaatttattattttatttagtttttagattttataagttgttttgtataattttagtttattaatgtggttttattattataaatttgtttatttagtttgtaattaaatttatttttaatttataagaaattattttatggttagaagtatataatatatgataggatatatataaattttaaaatttgtttagaattaataaaatttagaagttatataagaaaaaaatagaatttaaatgtttatttaaaaatttttataggatatatataaatttgtttagaattaataaaatttagaagttatataagaaaaaaatagaatttaaatgtttatttaaaaatttttgtttatttttaatttgaattttatgaagtggtagtgattaaagtaaatattaattgttttttatttaaatttttaaaaatttaaagagaaatggttaaaaatagttaatatattattgaggttaataaataaattttatatttaaatagagatgtttttaaaaatgagtaatattttaagaaaaattaatgtatttttaggtttttatgaaagtgagaatatggagatagaaagttagagattttgtattgtttgtatttaatttttattttgtttgttggatttgaaattttttttagattttataattttgattgttaaaaaatggtaaaaatgaagtttggaataataggaattatttaagtaatttaaaaaaaaaaaaaaaagtataatgaaaaagagtggaatttgaggttgaatttttagattaaatggttttattggttgtgagtagttgttaaattttttatttgattttatttatttagtttttataattaagaaaagtggatgtggttgtgttgttttgttttgttttgtttaagttatttatttttttttaagatatttgttttaggattatttggtagtatatttttgtatattttttatatggggtaaattttatatgtattttatattaattgattaattattaagtagataattaaataatagggattttttaattggtggtgatagaaattttaggaggtatgtgagatttatttttttaggtggtggttttttttttagaagaaaattttttggtttttgggttatgttaattttttttgtatgggtttagttttagtgtatgggtttagtgaatatttaaataaaatttttttaataaaaagtattttttttttagatagtttttttatagattaataaatatattttgtgttgattaatgagagttatttaattttgtttaaaaggttgaaggataattttgttgttttattttttaaaatgtttttggttagtaaattgggggttttgatttgtttttggtatatagttttgtgtttgaaattattttgttttttggaaagtttttttttgttttgtaaatataagaaatattattaataatgttttgaaagaaaatgggggtgagaagggggaaggatgggatgtttgtaaattttttagaaatttttttttttttaaatgtattgaatttttttattttgtgtgaaaaataattataaatgaattaatattagtattttttaattttagggtaaggagttggaattttagttggtgagttggattttttgttttttgtagtatagttattttagattttaattattttagatatatgtagatttatggttagaagtgaggggatattttggagggaagtgaaaaagtgaaattttttttaggggggtatttgattttaagagatggttgtagttaggttgggttttgggagtttatttgttggatagaaggtgtttaaggtttgttgtgaagtagtgaggttgggtggatttttttttgtggtagggtaggtagggtggggtgataggggaatgaagagatgagggttttttgggtttggttgtaaattttaaatttgtgttttgtggatatttatttttgtttttgtagttatttattttattagttggtgggattttgggtttttttatgtttgtgttttatttagtatatgttatagagaatgtgtgggaatgtagggtaggtgatgatttatgtgggatgtgggaggagattaagtttaggattaggtgtttatggtgtttagtgtgtttttttgggtttttgagaggttttttagtggggttattgtttttagtgtgtttggtgatttattttttagtttttttttgttaaaaagtaaaattgaaagttttttttggttttgagtttgggaggaggttttgtgaagttttgtttgttgaattttttttgtttaggtgtatatggaaataaatataaaattgaaggtttaagagtgttttttggaaagaaagttttggttttttttgtagttggagttttttgatgggaagtagtagagattttttttttgtttttaggtagtttgtagggatagtagttttggattgatgattttgggttgtaggtatttaattttttatgtattttgtgttttatttataaaatgagtgttttagatattttaaatgtttaggtgatagttgaagtattgagtgtatgtgtgttgtgtggttttttttttttattattattagtatagtagtgatgagtttggagttgtatgttgtgttgtggattaattattttttttttaagtttttgtttttaatattatgaaaatgtattttaaaatgtaaaaaaataaaaatattgatttttttgtgatgttttaaatgggtttaaatatttttaaggtttttttgtttgttttttaagataaaaatattttttaagttttttagagatgtttgtttttttttttttgattttgtttgttagtgtaagtagaaaagtgtttttattattttttttagggagtgttaggtattgtaaggttttgggtgtggggggtgtggatggttgttttgtttttttttaatttttttatttttattgtggtttgagatgtttgggttgggtgggtatgtattttggtggtttgttgtttttggagtgttatttgggtggttatgatgtgttgttgttttattattagtaggtagttggtgtattggtagttgtgttagtgatagaagtgtttgtggttttttaggtaggatattatgttgtggttgtggtagtgtgtgtatttgggtgtgtggtttagtttgtgtggttttgtgttgttgtttgtgggagtgtagtgtttttggggattggtgttggtgggtgaggtttgaggtgtgagtggtggttttggttgtggttttttttgttgttttggttggttgggtattttgggggatgtgtttgtttttttgttgttgttttttttttttgtgtttttgtttattttgttgttatttttgttgtttttgtagtttttgtttgttggtggtgggttgggtttggggggtgtggattgtggtgttttgtagatgtttttttttagttttaggtttttgatattgattttttagtttttggttgtggagttagtttgtgggttggttatggtgtttggggttttgttggggtttgagtttggtggtttttattttggggaaatataaagaaatttaaagatttattggttgttgttagggattatttttgagtttttggtttaaagtttttggtttgtttgtttttggttgtttgagttattttgtttttattatatgttttttatttttaggttatatgtgttttttttgtatttttagggtttttagggatttataatttaataaaggttttattttattaattttaagtgttttgtgagtatttgatttttaattgtggttttttttggttttatatgggttttttggataagtttttgggtaatttatttattatatatatataaaatattgtgtttaaataggtagttttaggttatttgttggatttttttatatttaattagtatggttatgatgtatataaaattatttgtggaagaatagtttttttttgattataagtggttttttagatttattgaagtattattttatgttttttaaatgttttttattagtttatattattataaggatttttttttgggtttgaagaggtttttttatttttttttttaaaatatttaattgaaaattaaaattttgttgttattagtgttttataagggtaaagagtataatatagatgtttgtttagttttaatagtatttgaggtgtatagggttgagttgtgtgggttttttgtatttaggttttggtttatatatttaaggtaaggtatttaagttatatagaaaaggtgaaagatgatttatgttttttgttttttttgatattttgagtggtattatagtatttattaaaattttgaggtttgggttggtagtttagttaaaagatatttagttttaggatttggtgttagggttgttggttgtgtatgtaaatagaaattggggttgttatttttaaatatgagattgggagttgatagttggaggtttggaatgaatttattggatggtggagggggagggagaaggtaggtggagggaaggagggaggaagttagttaagtttttagtgatttagtttagtatattttgaattttgtaaagttttgtttggttttttgtagttttgggtgttttattttgttgaggttgtttttggttttttttgatttaggttgggtgggaaaggttgggttgtttttgtttggtttagattgttggtttatttggtgggtgtgtgtagttgtatttagtgtagtgttattggt

SEQ ID NO: 117 - DNA, 42929 bp, Artificial Sequence
  chemically treated genomic DNA (Homo sapiens)
tattaataggagttgtagtttggaagataaagagtttttggtattgtaagttttgttatttgtgagtgtggtatagtgaaggtttggagagttatgatttaggttttgtgaagttaagtatttttattaagtaaaaagattggtaataaaatatttttatatagtatatgatagaatatttgtatttattttattttattggatattaattgtattaattgaggtatatgtatttttaaaaaaatgaaagaagaaaatatttagagaaaggattggtatgaggttgaggaagaaaaatgtgtattgtattttttagatgaagtagaaattgattagtaatttaaagttgtaatttatttaattttttaatattgtaaattaatttttatttggtttgattgtttgattgaaatgtaatttttgtgttggtttttagaaatttaaaaatatagagattagaaatttggttgatgaaaatttatgggaaaaaaaagtatgtggttttggtttgaaatgtagaatggataaataaaatgtttatagtgtaatattttaattgaataatttatagtaatagttgaaataaagtgatatattagattatatttgttataatataaaattttataataagattatgaaagtgatttttattattttggtaatggtgttttagtataagtaatgagatataatttttttttaatttggtatattaaatagtaaaggttatatataaatgttgtttttttagaatgtattttgtttataattatgtattgtagttattatgtatatattaaaagtatttatgataaagtataaaaataagaaaagattaaataagaaggtatttttgagttataaatgtttattaaagtatattttttaattatatagttgtgttatagttaaaaatatataaattaatatatattgttatgtaattatttgatttaatatagatttattaggaaaatattaaggttgtagtaatattttataggtaaaggttaagttttgggatatgaaagtttttagaaaatttataaaataaatttgagatatttttttgttttggaaaaaagtaatttgtttatagagttaaagttttgatatataaatgaagtatttaataaatattatattttattgtaataatttggagtaaaatttttgattttaatggttgttagtaaatatattttttttttggtagaaatataatgagggtttttgattaaagtagtaatttgattattttagtttttaaatttagttatttttatttgttttttgttttttttttttttttttaattaggttataagtatattaaataagttaggtaaattttaagtattttatttttttttatataaatatagttttttttttgttgtaagtatttgatgatgattgggtttatatatgtaaaaatagattatagtatatttggatttggttgatataatgaggtatttagattggtttatgattatttttgtagttatatattttttaatttaaaaaaataggttatagtagtttaaatttattgttttagttttggtggggtataatattttggaatggtaagtgttaaaaaatttaaatgtattgggtaagtttgttttgtgtagttgattttaatgtttttaaaaatattggtatgattttttatatttaagaagtatagttatgaaattttaaaataaaattatatgaagttttttaatattttaaattataaaatagatttgttatgttgtagatttttttaatagtttatttgagatttaattttgttatgttaaatattttttttttaaatgtttatgttttgaattttgtgttttaaattaattaatttagaatgagtgggaaaatgtttaattatttttttttttttttagtgtttttttttttttttttattatttttttattttatatatatatatatataattattaaaaatttttttttttaaaattttggtataaagattttaaaaagtttaataaaatgtaataagtatttagtatttaggatattgtagaattttttttggaagtttaattgtaatgaattttaaaatttgaaattttaatttatttttttaaatgtgaatgtatatattttatttgagttttatgtttttttagttattaaagtaattgttattttaaaaaatataattgattttatttttattgttttttttaaatagtttttaagattattttttgattttgattttttaaaaagtaggtattaatgttaatttttaaaaaattatttagaagagaaatttggttagttgtaatgggagttttgtttttaatttttgttattttgtaaaaagaatatttaggtaatttatggtattttttattatttattgggtagatatagtttagatttttttgttttttataggagaatgtttagatttttattaattttaattggaatttaataattagaatggttttaaaatttagttaaaatttaagtatgttatgaatttggaattttaatatattaattaggttatttttaaaataagattttgtattataaatagaattttaataaagatgttataaaaataagaatatattttaggatttaattttgagatttgttaaaatttgagtgaagaaaagaaattttgttttatttttatgttaaaaataggtggttgatttaattaagtttatttttagtatatttggttgtgttagttgtattttttaatttttaatattatataaggtatatattatttaatttttttttgaataagataatattaatatattgtttatggatagttaagtaatatattttatattatttggtgatttttttttttaatttatgagatttattgaaattagtatattatggttatataatttaaagtttggttggtttttttttttttttttgttgataatttaaattttgtattttggtaagtaaaagaggtataatattattttggagttttataatttaataatgtatattttaaaatttatgataatttatggaattttattatatttattaatttaattattgatttttttttgagtaattgattttatgatttatttttaaaagtaaggaagtatattagaaggtaaaaggataaatttatttataaatattagagtttaagttatttttttgaaaaggtgaaaagggaatttttggtttttatttttttttttattatttttaattatatattttatattgaaattatttgtttttgtttttttaataatatattttgaaattttgtttaatatattttttgtttatttttgtatatgggagattaattttggatttttattaaaaatggtttggttattaaaatattgttttatttagtagtttggtgtaagtgtttgggtgtatgtgtttatatgtgtattttaattttaaagaatgttatttttagaaataattaagatgtagtatgtatataataatttattgggttttttaagtttttgatttaaaaaaattttttagaagtttttgtatagtttattatttatgaagaattgttgggtatggagtatattttatttgatggatagttgatttatgtttattttaaatgttaattgagaagtagtataaaagaggaattggaaaaaaattgaattttattttttatttttgaagatgtgaatatttttaaaattttagtttgttttttgttttttattggtaagtttttttggtttgtaaattttggatagtattattaaggagttttatggattttttgagagtgatattgattttaaatgatttgggtttaatggttagattataattgaaatttatttttgtaggtttatttgggttggttttgaaattgtattggtgagttaggatggagatgaagagaaaaagttgtattttagaaagttttttgttaatgtattgttttttgtttattgaaaaaattattattttgttggttaggtttttgttgatgaggttatttttgtttaagaattgagttggattaaagttttttgggttaggttattttattgggttatgatttatagattattggttgataaaaattatagtgtttttgggaatgtggtagtttaagatagaggtgttggtagtggtggtatgaggaatagtgataggtataaagttggagaagtgtatggttttataaaggaaggttaggatatagggtaggttgggttggttatttatataaggtagatggtttttttttatgatttgatttaattttgtttgtatttgagtttgtatattaggatatttgtttggtgtttaatgtggagagagaaaagtaagtgagtaaaatttttattttatttagaaagtatattataatttattttaattttatttttttttaaataggttatttagtttagtgattaaattaatatttttgggaaaaaaatttaaaatagttttttaattttttattaaattataagatggattttaagaattatattttttgtaataggttttgtatgattaatgttgttttttttattataagttaaaaaatttttaagtttttttagttttaaaaagtataatagtagataaggttgatttttttattgggtattgtagggatagtgtttagggtttataatattttttaggggtttatgaaaatatttttatgttttttataatttttagatttaaaaaaatttatttttagttagaagaaaatatttttatatattattttaatgtatttatttttatattagggtagttatgaaatttaatttttaatttttttatagtataaggaatttataaaggtaaaagtatttagggtttatgaaagttataatgtgaaagtaaatttttttttttttttatttttttggataattttaatagatatgttgtttttattttatataaagataattggtgttttgatggataaagttatatattgtattttttaaatttgaaagtaaatatttaatgtttataaaattatggtataaattgtagtatttatttattgttgatgatataaattgatataatttttttaaaaaataaaattttaatatgaggtaagagatatgaaggtaatttttttttgttttattttaaatttagtaatttatgtttagaaatgtatttttagaaaataatttaagagatataaaaatatgtaattataataggatttaaaattttaaaaattagttaggtatggtggtatatgtttgtagttttagttatttgttagatagtggtgggagaattgtttgagtttaggagtttgggattagtttgggtaaggtagtgagattttgtttttaaggtaagtaaatatataaaattaaaataaaaattttaaaaatgtaattaaggttaatgattaatattaaagtttaataaatgattatatataattatatattattatagtaaaatattatatagttattaaaaattattaaaataaatattaaaagattagaaatgtttattattttgagttaaagtgttagaagttaaaaaataagtaattgattgtttgtaattttgaaaaaaaatgtatatatgtatgtgatgaagtggagttatttttagaattgtttttttaatattatattgtaggagtttgttaattttttttatagaaatatgtatggtggggagagttagagagtatttattttagattttgtggattaaattttttttgttgtattattttgttttgttttgtgttgtagagtgaatgtagttattgataatgtataaatgaatgggtatgattgtgttaataaaatgtatatataaaaatagattgtgtaatttgttaagttttgttatatgtttttttattaaaaaggaaaaaaaaagtattagtatattgaattgaaagtgatttttaaattgttttatttttttttgttgtttaattggagtatttggagaattattgtggttttaatgaaaaataaaggttgttttaaaagttaaaatgtttatttgtggatgtataaaaatttatggaatttattttgggatttttttttttttgatttttggttgatttttttttatttgatttttgttttttttttatttattatgggtgtttttatgattttaatattaaaaagttattttaagtatatagaaatttttaatttgtgaaggtagttgtatagtatttaaggaaatatagattgtagtggattttaataaggaaagagttattttttgttttttaaatatttttttgtggtgtttgtagatttagtatttttaattgtttatttgtgttttaagaaatgatataaaattaggatttttggtttttttggtaattaaaatttgttttgtgaaatatttgtttttagggatagtgtttttatagtaaatattataggttgtttagttaaatatggattttagattaataagggttaattttttagtgtgagtatttttgtgtaaaatttattttttttttgttaaatttggtaatttgatattagggatttgttgaatttgtgtttagtagagattaatgtgggtattagggggtttgttaattgagttaagtgtaggggttagaaatgtttgtaggtgttttttggatattttatttgtttttttgaatgttattttgtttttgtaaaagtgattgttttttgttttttattttggtattttttaaatttttagtgtggaggttttataaatttagtgttgtttgttagttgtggttgttttttgaaagtttttgtgtgggttatttgttggttggtttggtttttatgggtttttttggtttggaataaagttttgatgggtggtttgtttttagtgttagggttgggtggttttggatgtatgttgaggattagtttaggagaggttgttgtgtttaatatatttatgatattatttttttttttggaattattttagttttgattgtaatgtgttagggagagagatattagggtttatttttaagtatttaaaaatttttgtttttttggggggtggaggggtttttgtaaatgtgtttttatttgtaagtaggggaggggatgatagagataagataggagattggaggggttggggtattgttgggtggggtgtgtgtgtgtgttgtagtttttattgtgagtttttttattgatgtgattttggttttgaggggtggggatttggagtgaaattttaaatttggggttttgtttgtaaatttagtatattttgtttttattttgttttttttagaggagaaaagatttggtttatgttttttagaggttttatttggtgaagaggaggagtagttattgtagtgtggtggatagggtgttttggttggtgttgaagatgttagtgatagtggttggtatgttttttaaatttagttgtgtgttattattgtgtgagtttttggttgtttttttttttgtagagaggataaaggtgtttattatgttgtggggggtggttttgggttgaaggtttttgtagtgttttaagaatttgtttaggatgaagttgttgaagttgtggttgagttgtttgaatttgtggaaaatggtgtgtattgggttggggaagtattgtagttagggtattatgtttattaggttgtttgtgtttattgtgtgtttgaattttttgttgtggttgagtagtttatggaatttggggttgttgtggttgtagtggtagttgaaatatatggtatttatgatgttggttatggttatgatggttagtggttttgggttgaggaaggtgttgtttgtgttgttgtgtattagtagtgttattagtttgtgtgttttgtttagtatgtggtttttgaggatttggtggttgtgtggttggtgtgtgaagaagttgtgtattatgttgtgggttgtgtgttgttgtattttttagtgttttgagtagtggttgaaagttatgttgtggttgttggatattatatggaaggaggtgaaggttggttggttggtgaaggttgagttttgttgtattagggtttggtggatggtgtgtttgttatttagtattattatggggtagttgtttaggtggatttggaaaatgttgttgtagtgttgtgttaggtgagtgaatgagaggtgagttgtttggtttattgttgttgtgtttttgattagtggttatgtaaatgggtttgggggtgtggattggagttgttgtttttgttgttttagtagttgttggtttatatgtatagtggttagtattgataggagtagtaggagtgtggtttgttggatggatagtgggtttagtggttaagggttgtttgggttgaggttggtgtttatgttggggatagagaggagaaggtgtgatatttaggggtgtagagataggagtgggtgttttatgtttttattttagtttttggggattgagtgttgttgggtggagaggttggagttgattttttggagaaatggttgaagatgtttttttttatttttaatttatttttttttggagaagagaaggggtgtgtttttattttgttgtaatttagtgttaaattttttttttttttgtaaggtgtgtaatggtttttgtaatttggggataatgttgtgggtattgaggtggtggtgtttgattttttttaaagtatttattatgttatttgttatttgtaataatttatttgaagaggttgttgggtagtgttttggtagatagattgatttgtggggaggtgtggtttttagtggtgtgggatagttggttttgagaaggaattgggatttttgtttagggtaagatgttaataggaatttgtagtttggtttggatatttgttgtttttattggaagttttaatttttatttgagttttttggtgttgttagtgttaggagtgtttggattgggatggggatggagaagggtgttttgtttgttgagttttgttgtttttggggatttggtaaagttgaggtttttttatagtgttgagattgagattgggggttggtgagtggtgttaatttttatgtttttgtggtttttataattggagttgtagaagtgtttgtttttatttttattttagagttaaagtgtgttattttgtttttttgggttttaaggattgggtagaaggagggtagtgtgatttggtagggtggggtttgtggggggtggggtgtgttgtatattaggttgttttgatttggatttttgtttaggtgtattggttggttttggagttttattagtaggtttttatgggagtggaggtgtttatgtttttattgtgtggtaattgtgttttattatagttatttttaattgaggttgtatggtgtttttagaattatgtttggtataatttgttttggttgttgtgtttgatttgggagtgtgttttgttttgagtgtatgattttttttttttttttgtgatttgagtttgttttttggaaagttagtgtagtggtagtggtttgttttatagtgtttttggttggttgtttaaattttattttaggtttttgtaaataaattgttattttagtggaggttttttggtatgttaaattttttttagtttttgtggtgagattaggaatttttaaaagtagttgtttttttgttttggggttttgatagtgtttgggtatataaaggtttttggggtgtagttggttttgagattttttgtgtagaggttattttaggtggtgttgtttgttggtgggtgtggggttgtttaggttgtgatggaagttgttggtgtagggtggggagttaagttggggtgattgggggggtttgggggagttagtggggtgggatttgagtggggtggagagtggtaggaggaggtgaatttttgtgttttggtgaattttattgggttgaagtttttgttgttgttttttttttgtgtgtggagttgggttttgtgtgtgttgtttttggaaagttggttttagttatatttttgggtgttgtttgtggttgttttttttgtgttttttatggtatttgatatgtggaggtggtggttgagggtggggtgttggttattattatttttggtgtggggtgttggttgttattatttttggttgtgtatgtatagttgtgtttgttaggttagtgaggtggatgtttgggttattatttgtaggttgagtttgggtgtgtattgttattttgttgtgtattggtggttttgtggtttttttgggtgtgtttgtggttgtgaagggggttttttttttataagggaagttggaggtgtttgggtgggggtggttttttttgtttggtgtgtttttttttatatgttgatgtataggatttttaagatagttaagagaataaggattttatgaggtggggggaagggtgaatttgagggaagaggtgggatgtatttggttaattaggtaggaattgtattggttttattaaaggataaatataaaagtgataggtttattagggataattttgtattttgagttttatttgtgttgtgaattttgtgttattattgatttgtttatagatgaataaattagggtttagagaggttgtgtgatttaatttaggttgtgtagttattaagaagtggagttagggtttgaagttattaagttttattttagattttttatataagtttatatggaagaaaattgtagataagaggtttaaatgtttttttttttgttttttttaaaaaaaaaaatgtatgtggggttaggtgtagtggtttatgtttgtaattttagtattttgggaggtttaagtgggtggattatttgaggttaggagtttgagattagtttggttaatatggtgaaattttatttattaaaaatataaaagttagttggatgtggtggtgtatatttgtaattttagttatttggggattaggggggaaggtagtagaattggttgaatgtgggaggtagaggttgtagtgagtagagattgtattattgtattatagtttgggtagtagagtttaagtgagattttgttttaaaaaaaaaaaaaaaaaaaaaattagttggaagaattttttaattattgtttttgtttttataattgagaattttgagaatagtagagaagaaatagtatgttaattttttgtaattaaattgtttatgagggaggttaggggagtgtgttttatagttgattttggaatgattgattatattgtaaagaaatataaaggagtgtttgaaaagaatttgattttttgagagattgaaattagtaattaatttgttgatttgataaagaaatgtttttttgtgatggttttttttatttttatttttatttatttattttttttgagatggagttttattttgttatttgggttgtagtgtaatggtgtgattttggtttattgtaatttttgtttgttaggtttttttggtttagttttttaagtagttgggattataggtgtgtattattatatttggttaatttttgtatttttttagtagagatggggttttattatgttggttaggttggttttaaatttttgattttaggtgatttattagtttgggttttttaaagtgttgggattataggtatgagttattgtgtttggtttgtgatgttttttatttggtattttttgaagagttttttggaaatgattttatatattatgatggggaatttagatagtgatggagttttagtttttgagtagttgtattggtttaataataagtgttggttttttagaggtgagttggtttatatagtttttgaaatgagttttatagtaatttttttatgtttagttttagtaagatttttgtttaataatttaagattttggtgtatgtattaattttttatagattttaatttagtagatgggaattatttatgagttaatgttaattttgagttgttgatatttttgaaagtttttattataatatttttgttagaatgagagtagatggaagttgtttttaagtaaatttttatttttaaaaagtataaaatgaggttgtttttaagattgtttgtttaattttttaataatgttatttagtttttagattaattagatgtatgtttttttgttattgtagatagattagatatattttttaagttgtagttttttgggtttagttttttttttaggatatgatttaaaaattagaggaattaggttggtaagtgttgttagaaagataagtttttattggttatggtaaattaaaatgattggttatggtaatattttttgtagagaatttttaagtttggagtttttagggttttatggtgtaaattttattgaatgttttatttggtattttgataaggattttggataaatttagagtagtttgttggtattttgatttaatttaaggtagagttttgtttttagtgagaatttatgtaggttttttaattattattataattttttaattaaagtagggatttaaggtttaggaatttttttttaattaatatagaatatgggtattttgtttttttaaattttaaatttgaattgtttgttgtaaataatttttaaaaagaatagttaagttagagggatagtttaaagtagagagaggtttaaaatattttattttgtattgatttgaaggaataatttaagtttgtttaagtagaataggaatgtattggtttatgtgtagagaaggataattgtgatgttttataggatataaggatttaggttgttttattggttttttgtttatgttggtttttgtttgggttttttttttttgtatggtaaggaagtagtttaaaattaataaaataaagagaaagagaatagtttttttttagggttttagaaggattttagggggttaggttggtattaggtttttattttgtgggtaagggtttgttttgttattagaaaaaaagagatggtagaatatgttaggaagttaaagagttgatttagtttattttatgtatatatgtttgtttattggtttttttgggttggaggataatttaaggaaatttaaagttattattgttattattattttaaattagtagatatatgtattgtttttagagttagtagtttagaaagttttgtttttttgttgttaggttggaatttagttttttttatggtttttttttttagtgtgatttttaagttagtttaatgggtagttattgtgtttttttagttatttttaaatatatatatttatatgtattgaggagagtggaggagaataagttatttttggtaggtttttgatatttgggtgggtaggatttagttattaggtatatgttggtaggtaagaggagtagaaataaggagatatattaagtggttgagggtgtgatagagggaggaattgtaggataatgtatattaggggttggattatgaaaggaattttaggaattgatattaaaattttgtgttttatttgaaatgttttatttttttttttttggtaatatataggtagagaattatagagttaatagaaaggtattttatttaattttagaagttattatttgtaggatgtatttttatttttatgtattaatataaagaaaggaagttattaattataattgtattattgattttaagatatatttagattttggagatgtaaaatggaaagttgagggtatgatttggagttgataaagtattatatattttatgtgtgtttgtgtgaagagattattaaataggttttgtgtgagtaataaagtttttaattatttgggtgtaggtgggttgagtttgaaaagaaagttagttaagggagataggggtggggtggttttataggatttgggaaggtaaaggaaaaaggggggttgttttttggtgggtaggagtgggggttataaggtatttaatgggggagtttttgagttaggatgagttaggagaaggaattttataagaaaatgttattagttaaggtaggaataggttatttttattttttttgtggtggaatgttattagttaaggtaggaattggtgatttggatgtgtatgtgtaggttataggggatatgatggttttgtttgggtttagagggttgatatttttgtttttttatattaataagaaaaataaaattaaatagtggtaaagttttgggatagtgaaaatttttgggggtggtatggagagataatgggtgatgttttttagggttgttttagtgggattaggggtggtgtgggaatttagagtgggagagattaagttgaaggaagattttgtggtaaggggtgatattgtggggttgttagaaggaatatttgttatttagaattattggtgatggtttggatatagttttgtatgaattgaaaaattaaatggaataagagaaggagaaaaataggtataaaaggtttaagaattgggataatttaggatatttgattagagagtgtttaaggagatttagtatagttttgttagtaaagattatttatttattttaagagttaagagtggtagtttggggatagtattaggagatattagttgtgatggtttggagaaatagtgtaaattggtagtgtaaataagagtagggtgtgtatgagtagttgagaatggtgaataggagtatgattagatagaagataatagggatgataagtttttttggggtatagtttaagttggtttggtgtttggaatgagattggggtttaataaaaaggagtgtttatataggagtttaaatgggttgtattttgtagtattttgaggataggtttgatttttgagaaaggaaagttgtaaaagtattgtttagttttttttaagttggtagttgagtttggtgaggtgtgtttttaaaagatttttagtttgttttattttttttgaagatggaggattataagggatataaagattttattgaatattaagagtttgaaaaattgtttggttgatttgattaataaaggttggtttgttattagattgtatagaggtgggaaggttaaattgaggaattatgtttgatagaagggaagaaatgattgtggtggtttttttagattttataggaaaggtttttatttatttagtgaaagtgtttatttagattaagaggtattttagttttttgatttgggatatgttgagtaaagttaatttgttagttttgggtgggggtaaatttttaagtttgatgtgtagggaaggaaggggtttgaataatttttgaggagtagtagaatagtagatggaatattgagaagttatttttttgaggatagatttttatgatagaaaggaaatgagaggttttaagaggtgggttagtggtttgtattatagtatagtttgtttttgttggtgtgtggtgattaggtttggtggaattgttattaataaattaagtgtgattagggtgaggaataggaaagaaggaaatatggggaaatggggtgaatgttaggtggattagagagatatagttatgggggttaggtgtggtattaggaataatgtgggaggttggattgaagtttgggttaggaataatagtaattgtgggatttaataaagattgagtatagttgaaggagttggggagtagaaagtatatgtgttaggtgtgaggaagaaaatagattttggaagttatgagaaatgtagagagtgagttgagtatagtttgtgatttttagggtttttaaaagtattagggtggtagtagttgttgtatggagatatgagggttaggttaaaatagtaaggttaagttgtttgtataggaaggttatagggtgtggttttggtttttgtgtaagaattttgattgtattaattatgtttaggaaggaaaggtgttgttgttttgtaagggattgaggtttgggagattaattggatatgattagtagggaaagtatgtgtgtttttatgagaattatgttgagataggtaatagatgaggatgaaatttgggtttgattgaagtaatgggggttgtttgtgaagttttgtggtagtatagtttaggtaatttgttgagtttaatgggtgttagggttagtttaagtgaaagtaaagagaggttgggatgatgggtttaaaggaatagtaaagaaagtatgtttgagatttaaaatagaataatggattgtggagggaggtattgaggataggagagtatatgggtttggtattatggggtggataggtaaaataatttggttgataaggtatagattttgaattaatttgtaaggtttgtttggttttaggataggtaaaatgggggaatggtaaggagagtttataggttttaaaaggttatgttgtagtaggtaagtgataataggttttaatttttttaaagtatgttgtgggatgggatattggtattaattggggtaaaggtggttaggttttaatgagatggtaagggatgtatgattggttattaaggagggagtagaggtattttatatttgtgggttaaggtgggggaatataagaggaggatgtaaaggaggttttggattgggaagaagggtagtaatgagatgtagttgtaatttaggaatagttagggaagtagataatttagttaaagtggtttgttttaataagggaattgggtaggtgtggataattaaaatgagtgtttaaaagagtattgtttaagttgttattagagttggggagttttaagaggtttagaagtttggttgttaatatttataatagttatggaggtaagggaaataggtttttgaaaagaaggtaatgtagagtgggtagtttttgtattgattaagaaggggatggatttattttttattgtgagagttatgtgaagtttggtgtttgtgatggtttagggggtttttaaggtagttgggtagtattagtttttagttgttaagttaagaagatttgggaagtagttagagagttttgggttagagttttaggggttttgggagtggttgttaggtgagttggatagtttgatttttagtggggttttatatagatgggatatggtttaggaggaattttgggttgtaggtattttttggtttggtggttagatttttagtatttgtagtaagtttttaggggaggaggttttggaggaatgtttggttgttgtggtttaggtgtttggaagtttttgtgtgttggagatgtggttggggtttgttttatagtggaggtaaggaattgtaatttttttttattattgtatattttgaaggtgaggttaattaaattttgttgtggggtttgagtgttagattttaatttttggagttttatttaatgttgggagtagattgggtaataaaatgtatattgagaataagatggttttttgattttttagggtttagggttgtaaagtgttttagggttgttgttaaaggagttatgaattgggttgggtttttatgtttgatgaaaatgttatttgatttgggataaagaaaaaggagtattaattttgattgtgtttttagttttagttatttttttaagagttaattgttgggtaggtgggggagggttagttatgaaatgaaattgtaaggtagattaggtgtgaggaggggaggtgataaaaggattatagggtggaggagtggaggttgaggaagaattgggatttagttgggtttggtgaggagtagtttggggaggtggggagaggttagatgggtttgtagaaaaggaagattagaaagttttagtgatgtttggggttgggattgaggggataggtgggagggaaagaaggaagatttgggatgagttgtattgggaatagagattagagagggattgatgtgtaaaagaatgtttggatgttaggtattttagattatttgtttattttataataagaattatttagattttgtaggatggaaaaattgaaagtgttgttttttggttatttggaattattgttgagtttgtattggggttaagtggtattgtagaagaaaataagatgtttagattttaatttaggtgagagttgaagaggttttaagtttttgaggatataggttaagggagaagaaggaggaatggagggtggaaagttgtttatagtgaaggaagtaagtttagagaaaagagagagtagagatatggagggaaggggtttgggggtttttattttttagaaaagtgggaaaggggttggggtatggagaagaggttggggtatggaaataagggatgggggtatagagattagaggttggggtgtggaaataagggattggggtatagagatataagaggttggggtgtggaaataagagattgggtgtagagataagaggttggggtatggaaataagggattggggtgtagagatatgaggttggggtatttgttttttttttagaaaagtaggatttgttgtttagggtgaaggagaaggggttggggattttttgttttttagaaaggaggagaaggggtagagatatggagagaaggggttggggtatttgttttttttttagaaaagtaggatttgttgttaagggtgaaggattaaggtaggtgtttttgtatggtttgatatttttgaaatttgggtgaataattattgtagtttttgtaatgattaaatattaagggaaggttgtttttttagtttttgattggtgttggagttttgggtttatggataaaatgtgttttttttgtttttattagaaaatgaaaggaattgaaattaagagaagggagagattgaagagtggaaaggagaaagtggttgaaggatagtgagagaggttggagaagagagtaagaagaggttgtttatttgatttaaaattggtgagatgttttttgggttggttggtttgaggatttgaggttgtaggtggattttttttatggagtaaagaataggaggataggggattgtttttttaagggaggttttttgatttgatttatggtattaaattttatgtatgtttgtgtgaagagattattaaataggttttgtgtgagtaataaagtttttaattatttgggtgtaggtgggttgagtttaaaaagagagttagttaagggagataggtggggttgttttatatgatttgggtaggtaaaggaaaaaggggggttgttttttggtaggtaggagtgggagttataaggtatttagtgggggagtttttgagttaggatgagttaggagaaggaattttataagataatgttattagttaaggtaggaataggttatttttattttttttgtggtggaatgttattagttaaggtaggaattggtgatttggatgtgtgtgtgtaggttataggggatatgatggtttagtttgggtttaggggtttaataatataggttgataaggattttttttttgtattaagtattttttagattttttggagtggttagtattaagggtattggttattaatttttatttttattaatattattttatgtagataaatgtagataattgatgtttttttaattttatgtaaagttggtgagaaggtgatttagaagattttgttatttttattgatttaaattaatttaagaaaagatagttatttgttaagtagttgtagtttaaaataagttttttatttttgttttttttttaattttgttgtttatgagttttgtttggtattagtgaaagtgatagaaatatatgtagtgaaagttatatgtattttagttttttattaaaatgtatatttagaggtaaaggggtgtaatgtttgttatttatttttaaatggtttaaggaaaaaatagaggggtttggggagaaggagagggagagagaggagaatgagaaagtaagtgtggttaatgttaattggagaatttgggtaaatgggagttttttgtgattttttgaaatttttttgtaattatattaaaattaaaagttaaatataagaatataaaaaaagatttttttaatattttgattttatattgtttttttagttttttttgagggttttttgtaagtaaggatagtggaaagaaagtgggattagtttgttgtttagggttttgtatttgatgtgttatttttggagtttaggattaataaaaagtttgtgtttaattgtagtttttttttttagtattatggattataatttgtattttttgtgttgtttttgttttttgaatggtttgagtgtgttttgttttttttattttaggttttttttaattttttttgaaagtagaagaaatatgatataaggtagtgttatgtttttagttttattgtgtttttgtgttaaggggtataatttatttagggttttatgtgttttataaatgtagtaaatggtgttgtgttttaatggttttttttagtattatttttagtttttttttttggtttgtttttttttgtttttttttttttttttgttttatttttttttttttttttttattttgttttttattttttttttttttgggtttatttttattttttttatttttatttttttaagatttttatttttgttttaggtgtttttttttttgttttgttgtttttttttttttttttatttttttttatatagaagagtaaagagttagggtagaggggaaaagagtgagggaaataagaagggggagtagagagatatagtaattaagaaaaagaaaaagaaaaaaatatttagttttggggttaaaagatagttatggtggttagttattttgtttgggtttttaattggtgtatttattttttttgtttaatgtttgagtatgtgtttttgttgtttaatatttgtggggtgaagtttttattgatttggtatagtgatgattttatatgaagggaagggatgttagggtttgtggttgtttttgtatgtttgttttttgagtttttattattatttattttattttttgaaatagattttttttttttttttttttttttttttttttttttttttttttttagagttttgttttgttgtttaggttggagtgtagtggtattattttgatttattgtagtttttatttgttatgtttaagtgatttatttgttttagtttttttagtagttgggattataggggtgtattattatgtttggttaatttttgtatttttagtaaaggtagggttttattatgttggttaggttggttttaaatttttgatattaggtgatttatttgttttggttttttaaagtgttgggattataattatgagttattgtgtttagtttgaaattaatttttttaatagtgaaagagggagtttattgtttataattttggttaatagggaaatattttatttttttaattttttgattaattatagaaaatttttaggtagataaaggatattagtttttttttttatttttattttttaaaaataaatatttattaggttattaagaaaatatataaagtaataagtaaaatattttattattaaaagaatgtatatttgggtttagttaagattataatatttagttatggatatgttgattggtatagtttttaggtttttggatggttagtatttagattttagtttttttttttttttttgtttgtttgtttgtttgtttgtttgtttgtttgtttgtttttttttttttttttttttttttttttttttttttttttttttttttttttttttttttttttttttttttttttttttttttttttttttttttttttttttttttttttatttattttttagtttttagtattagatttgtatttttttataggtttttttttttttttataaatggattaaaattttggttgaaaattttgggtgtatttagggtttgagaaaataattgatagttaaataatttaagtggttagtttttttttgtatgattttaatggagaatataaaggttggatagttatatgttagtttttttgattattgatttttaataggattttttttttttattattgaagtgattattttttaattgttgtttgttttattgttggattgttttggttagaaagttgtagatgttagaaggttttttttaatattaagaaaaattttggagtgaatttttttgttttttggtaaatttagagttattttttggagtgatataaagtaagatttatttttttttgttgttatatgtttgaagatggaattgtgttgtttttgagttatttttttattaattaaaaatgttttagttttttatttttgttttttggataatgtgtttttttagtatgtttatttgagtatgggtttgaaattgaatatagtattttaaatatgatattttgtttagtttaggggggtgtggttattttttattagatatagtgttatttttaatgtaaataaagtttttgttttgttttaatatatttgtattttattattaaaatatttatattttattaagattgtgataagtaaaaatttttattttttaatataggatttggtagttggttgagtttttagttgtatttgtattattgattttttaaaaaaatattatatgtgagattttatatttatttttattaaatgtattttgtggttttaggatggtgttttggtttatagaggttatgttgatatttttaggagtatagattaggataggataggaagattatttagggaaagtatggtttagtttggattatttttaggtaaaaatttttggattgtggtttatgttatatagttgtattattatatatttagaatattatgtatattaaattatttttttattttggttagatatttatttttaaaatatatatatgtagtaatatagatttttgttgtaagagagttaattagtatataaaaatatgtagaaaaatgagaataaaatgagaaaatttatatttttatttttttttagagtaattatgggtattatgtgttttttatttatgtatatgtatatggttgtatatatagatagatagatagatttattttatgattttaaattattgtatggtatgattatgatattattattgttattattattattattgagatagggttttgttttgttatttaggttggaatgtagtggtgtgattttggtttattgtaatttttattttttaggtttaagtaatttttttgttttaggtttttaagtagttgggattataggtttgtggtagtatgtttggttaatttttgagtattttttagaggtggggttttgttatgttgtttaggtttgttttgaatttttggatttaagttatttttttattttagtttttaaagtgttgggattataggtgtgagttattgtgtttggttaatattatttttttaattattaatggtgatttagatggttatttgtgttgtttttaattttattattagagattttattgtagtgattttatttttttgtgtaattttgaatttatttgtaaatgtttttttagtattgatttttaatagaaatgtttgagttatagggatatatgtatatatgttatatttttattgttttttaaaaaggtttgttaatttttatttttatgaattttggttttgtattaagtagaatgtatttaaatatttttttttttataaaggatggttattttgatttaggtttgttaatatggaataaaataaataaaataaaaattttatttgttttttagatttatttttttttttaaagaatatatatgtttgtgtttagattattttttttttttgataaatgagggaaatttttagatgaaagttgataaaatattagatgggggtgattttggatttttatatttttatggaatatattatagaagttaggattggagagttaattttatatatttttatatttttttttagatgaatggtaattttttataggttgtgggtgtaggtttaaatgttttttgggtttgtttaattttttagaggatattaaaggtaatatagttagtatatttaattattaggagtttggtttttgggattgggtatttttgggtgtgagtattagtttttttatttataagttgtaattttggttatgttatttaatttttttgagtttgattttttttatttgtataagataggtaatatattaattatagagggtggttttgaggattaaatgagatattgattgtaagaaaataaatagtatagttgatggtagagtgagtatttaataatagttagttattattattattattattatttattaagtttttatttttgtttagtaaaatttaagatatggtaaggatttgaattttgtaggaataaaaatatggtttatttggtttagtgtgatagtttttagggtggtgtgttgttatttatttgtaaatttttaatagtttaaagtggtattagttattttttttttgtgttttttaggtagtatattgagtggttgttagtattattttagagttagattgaatttgaatttggtttttttatttatattggagtgatttttatgttagaaattgtttttttgggtttagtttatatttaagtgaatggagatgtaaaatggagatgatattagtattgattatgtagagttgtggtgaggattgaatgaattaatatatgtaaagtttttagaagggtgtttggtatgtggtgggtgtttaggtattattagttgttattattattttgtgggaggttatttgttgttgttttaagaaggttgattttatagaaatatttgttgttggtagaagagtttagtattaatagttaatttgtgtttttttttaatttttagatggtagttttgtagtattttttttttatttaatttttttttatttagatgtgttttatattaggatttttaggtagtatagagatagttttttaggtagggggatgttatgtttttaaaagagtttgatgaggttatagtaggttttttttattaagttatgtttttggttagtttttttgtgattgttatggatgttttgtagttttgtggtaatgaggttttaggataatatttatgtaattttttgttgaggagagtttagaaaattttatgttgtgtagtgtaattgggaggaaatttaagggagtgttgttgtgggattttttggtggtgatttgtataaatgatgtaatgttatttagttttttagaaaatattgttttttttttttatattatagttttgagttaaagtgtattgtggttttagatttggggtatatagtttatttgatagttataatgagggaaatagtttatttttggagtttgtattagaaggtagaatgggagatttttagtttttttttattaaaggttagggaggaaattgttttgaatgttttttagtttaaaatggaaagttagatttaatggtttgtatttttgggttgattaatttttgttttttttttttttattgtgttgagttagttatggggggtgggttgtgtattttaagggtttgaatgtagaaggaaggaaggttttttagtttttgagttttgagaaggtggtattgtggtttttaattagtagttatgtttttaggtattttatttttttatattattttagggattttttggtgtaataaggatgtgattgagttttgagtttttaggttattagttatattttagtggaattttgggagttatggggtaaaatggaatttttttttatagtaagtgtatagaaggtatttagggttggtgggaatttttatttttgtttttatttattttggattttgaatttaatatttgaggttttttgtagtaaattagagaggtgaagagtaatttatatgtattttttttttttttttttttttttttgagatagggtttttttatgttgtttaggttggttttgaatttttgggtttaagggatttttttgttttagttttttgagtaatatatattatttaataaggaataaatattataataattttgagtattatagttggagtattgtgttttgttaaatgtgaggagtattttttttgatgttattattataaggttagggtttgtggtttaagtttttttgtttttttagagttttttatattatataataagtttggagatagagaaagtagttaatatttttttttaagtgttaggtattgttttttattttttatattgatagttttatttattttttttaattattttaaaaatattggtatatttagtttgttttatatataaagggattaaggtttagagatagtaaattatttgttaaatgttatagaggttgtaagtgagaggggttaggatttgaatttaggtttgtaggtattaaagtttatttatattatattagtatatatttgttgatttattgtgtattattttaagttttatagaagttttatttttttaattatagtaattgtagaggtttttagtattgttatgtttattagggatttgggttattttattgtttttttttgttttgtgagttgattttttttaggagtttaagattataataagtaaagttattttgttgttagagtttgatgtaatttatatttttttttttttttttttttgtagaatatttttggtatttgtttagtaatttaatttttataatttataattaaattttgggatggtttagaaaatttttttttaatatagtggttggaatatgtagagagttggtatgtagtttttatatgggttttatgattagatttgttatatttaaatttattatattgaaattattataaaatttatattattttaatttttagaaatgatggttttatttagaagtaagtgagtaaaagtaatgattttataggttttagtgttaaaattttagtttaatgttttttaaatgttttgtttttagaatttttttaaagttttaaaaaatattgtagagtttaaagaattattgtttagttaagtatttattaatatttataattttagaaattaaagttgaaaaatttataaaatatttgttagtttattaaaaataataaatttaatatatgttaatataaataatattttatggaaaataattagtttttaaaattataaatatttagttagagtgggtagttttaaaaaatattgttataaatttttttaatttatgatttaatagaagatagtaggtgatttatatttgtttttgtagaaagattttttagtaaatttgtaagagaatgagagttagaaatgtaaataatgttttatttttatagttgtaattttgtgggttttttggaaagggttttaggggttattttgatggggtgtttggattatattttgagaattattgtttaaatttaagagtgtgttttttgggttgggtgtggtggtttatgtttgtaattttagtattttgggaggttgaggtgggtggattatgaggttaggagattgagattattttggttaatatggtgaaattttgtttttattaaaaaatataaaaaattagtttggtgttgtggtgggtgtttgtaattttagttatttaggaggttgaggtaggagaatggtgtgaattttggaggtggagtttgtagtgagttgagagagtgttattgtagtttggtttgggtgaaagagttagattttgttttaaaaaaaaaaaaaaaagtgtgttttttgtttgtgtgtgtgtgtgtgtgtgtgtgtgtgtgtgtgtgtgtgaatgtttttttatttaagaaaaatttaaatgggttattgttttggtgtaggaagtaggtgagggtgtggtggattttagaaaaaataatgttttagttattgattttaagagaatagttttgagataagtgtgggtgtattgaaatattattgtaattttttaaattattgtagagttgttattattaggtgtttggttagaaagatgttatttttttaagatagttatttgtttagatgatgtattttagttttaggaaggaggaggaagaagaggtagatagaatgatgtttaaatttttgtggtttggagatgaggtagtgtttgagttaggaagttgggagagtttagtttagtggaagaggtatgtggattttggttaggtgtgaagttaggagggttttttagttatagtttgaaattgaagtttaggattgagttatagtttgaaatttttggattgtagttttgttaattaaattaatggtaataataataatgtattgttatatatgtaagaattgttatatatggagtattttgagttaggtaatgtgttaagtatttgatagaaattattttattaattttatatagttaattttttgagataattattgtttttattttttttttatagataaataaagtaaggtaggaagagttggaattattaattaaggttatatatattatgttggttgagttgaaatttgaatttagttttgttgggttgtaaaaattttttgttgttttttagttgtattagttaggtaaatttttgttagaggaaattttatagttggagtgtagtaggtatagattttttttatttaattggggggaggttgtagttatagtgaagggaatattattgtgttttatgggaagaaatatgaagatggagtggatgttttatttttattttaattagttatttggagggtttagggttgaattgtagtgggggtattataaaatttagggaggtgaggagttttttttagggaggtgatagtttgagtatatggtttttaagtttttagatttttttttgtatttttttttatttagttttgtatttggtattgttgttattagttaggaagtttgagatttgtgtaaattttgtttttttttgttgtttttgtaagtattattgtttttttaaagtttagatgtggggttttttggagttttgttttttagagggttgtttggtatatggttatttttatattttgttttttttgagtttagttttttagaggtgtgaattttttataaatatatattattatttaattttttggaaaaataaataggataattgtgtgaaaattttattttaaggtatttttttttttttgtaattagaggttttaaggagtttagtatagtatgagtttttaatttgtgtgtagataagtataaaaggtataattggatatatttgttattttttaatgatttgagagtttgaagtttatgttaagttttgggttatggtatagtttgtatgtaaggttttgtagtttttgtaggtaattgagaggtggtggtgtataggatagaggaataattttgaagtgatagtatataatttaattttttttaagttttttaagtatgtagattgttttttttttgttagtgtataatttaagtgatttgttttatttaggtaagaaatgtttaatttaaattatattgtagttaagtttttagtgaagaaggagaattttttgaggtttagttgtgtgtggttaggttggtggtagttgaggtaaagtagattttttttagtttttgtattttttatttaggttatgattggagatatgtgggttggggggttttaattattatatttatttttttgttttatattttattttttgtgaatgggtttagttttagtaagaatgtttataggagagtgttggttatatgtttttaatattttgggtttgagttttatttgagttattaggagttgggtgattttagggaaattttttaaattttaattattgtttttttttttttgagaaataggataaattggtagtgggggtgtatagattggtatatttttgtggtaagtgatttggtttaggaagtaagagatttgtgttttagtttagttttgtttttaattagtagtggatttgtagtaaggaatttttttttgggttttaatttttttatttgtaaaataagtaggttggatgaaatggtttttgaagtttttttagttataaaatattatgtatgttttaaattatttggagtttgataaaataatagttataataattttaattattattgtgatttttttttataattttaaagattttattagttatgtaaattttttaaaatttttttttaaaagtattttttttggttttattgatatgaagtaaagaaggattttaggtttttagatggtaggatttggggtagatattttgtgtttgttttattttttatggaattattaaattttttttttagttatgttagattgttaaatggtttttaagtatagtttatattttaaggttgtttttttagttaaaaatgttttttttttttgtttgttgtgaaatttttttttttttatttttttttttttattatgggatagtttttttttttgggtttttttgagtattttatattattattttattgattttatgttgttatttttggttttgtatttaatatatttttgtttaattagatttttaggaattttgttatttgtattatttagttttttttttttagttttttttagtatttggtatatatttatggaagaattaatttttgaattttgtggattttattataataggataagaatgttgtatgggtttaggatagatgtttataatttgagatgagtagtgttagttttagtttttaaaggaaatttagttagggtggtgattagagatattttgaataattattttaggaaaggattaaatttattgaaaagttgtttattttagtgaaaatgttgtaattgtggaaagatataaaagataaaatgtttataattgtatttttggaagtgtttttttttaaagaataggaattattttattaaagtatttgaagaagaatgtgtgtggttgtttgtatgtagttgtttatatttaagaatgttatatattttattttttttaggattatttagtttaagagaagaatttgaggttatttttagggaggaaaggatatttatattgggaatttaattgatggtagttaagtgttttttttttttaataattgggataagtatgatatatataattttatatagtatgtttggggagtgaggagagaagttagagaagattgagatgagtgaaatgtaggtttgattgagaaattaagtagaatttttattaatagtgaggattgagggagaagtgtttttgtaatggaggggaaatgaataaaattttgatttttagtttgatagggatttttttttttttagttagttggaatgtaagttttaaaaaaaaaggaagtgtggggagggttattttttttaataagatgttttagaaatgattatgaatatagtaaagttggtttttaaaaaaggaaagtgagaaaagtagtgataatttgaagttggtagttgaggaagaaggagaatttttgaatttatgaagagagtatatttggtttgggtgggtaggattttaaagtttttaggattgatggattagaatagagaaatgaaaatgtaataagaatagttgtggggaaaaggtagaaggggggtaggaagtgaagagggtgtgtattttttttttttgatttgagaaagggaaattttgtgttgggaagagttatgtgggaggaggaaggaaaggtgttaggaatgtttggaaggtatatgatgtttgattttatgattttttgtaataatttttatattgattgtgtttttttatttttgttttaaaaatgtggttaggtaaatatttgttttattaatattgtgagaaattagttttgtttatagaattttataaaataatttgtaataatgagaggttgttaggatgtaggtgatattaggagaagtaatgttttgtttgaatttttagggttttggaggtattgttttgggtttaaaatttttttttagtgattttgaatgtaatgaaataggagagaatgttgattttagagtagtaatagtataaattatagttttaatgtttagtaggtttagtttgttggaataattagtttaggaaatgtatgatttaagatgtttttatagtggtttttataaagtttgaaggggaaataaagagaaagttagagagttttttatagaagggaattaattgtgtttatatgtaaaagatttattttttgtggttatttaagagtagtgattttttgggggtggaataatttatatatgtgtaaaaatatttatttttttatatatttattttaagtatgtgttaaaatatttgtaaataattttagattttttttttattttatttttattttaaaggtagtgttatatggatatttaaatgtttagagaggataattttaaatatataaaagaatgataaataaataaataaataaataaataaataaaaaaaagattttttaatttgttattatttgtatgttggaaattgatagtgttaatttgggtaatatttttttaattttgattgaattatatgttaattttttgtggtggttttagattttagatgttattagtaaattatggaggaaaagtaagattatatgatttatgaattattatagtagtaatagtttttaatttttatttattttttgtgttatgtgatatgttttagaaatttatttaaaattgagaaaataagttatttttaattgtatttaagtaaggaaatagtttatttatgaatttaagaagattaaagaatatggttttagtgtgtttgtttagaatttatgttaaaatttttttttgaagtataaatttggtttttttttttttttttaaaaaaaattttaataaagttaaagaaagaaagaaaggaaagaaagaaagaaagagggttttatatgtagttttagtattaagggattttgataagtaatttatttttgttttgaatgtgggatttttgtattttatgatatatatttttggagtggttttgttttttttgtggttttttttttgtttgttttttgttttttgttttttttgtgtgagatagtggatttttttatttattattgtattattggagttttatgtgatttaatgtataaaaagtgaggttattttttaattagttgtttgggtttttgtaaagtttaatttttatagtttattttaagaggttttttaaaaatgaaattttaagtatgttgtttgatattttttaatatgtttttaattaatttgtaataaagtttagttttttttttattgtatattattgtattttttttgttttttttatgtattgttttttatttattttggttttttggttttgtttttaatgttagagtgatttttgggtttgtttttttttttttttttttgtttggaaattttttttttgaagaatttttaaatggttgttttttttatgtatttttttttggagtattattttttgatttttttttttagggttttgaatttattttattgttgtttatttagttagttttttttttttagttggtatttattataagtaatttgtttattttgtttttggtgagtttatatttgtttttattattggattataaatatttttaggatagagatttagtttatattatttattattttttttttttagtgtttggtatgtagtaggtgtttaataaatgtgtattgaaagaatggatgagtgatatgatattgatttgtatttattttttttttttagtttatttttgttgagttttggtattgattttatgtgttagtatttgagaaggagagaagtttttgagttgttttgtaaatgtggtttaagtgagatgttgaatagtgttagttatgtggattttgttatagtgaaggaggaaggtagagaaaatgggttttagtgtgtgtgtatgtgggggtgggaggggtgtgttgatttaggggtgtatagaaaatggtggtgtgttttatgatttttttttttaaagaatgaaattaggatattaattgagtatataagaggggaaagtggtgtagtagggttaaggtataatgaaaagatttagaattattttaaaagagtaggaaagtaaattatgtagagatgtataatagaattttagtgttgagtttttattttattattatgaatttgaagtgagatagttggaatttgggatttttttaatatttgagttgggaaggtaaattgttaattatttttatggagttagtgttttttgattaagtaattttagtttaggaatttattttaaagataattggataagtttgagaaaatgtatatataaagttgtttaataaaatattttattataattgataataaataaatggaaagtatttaaatatttagtaatatgggattggataaattttgaaatatataatgggatattttgtagttattaaagattgtttgtttatatttattgatatgatgaataggtatgatgagttattggtgaaaaaaatgtagtttttaaattagtatatagtgtaaaatttttttttaaaagttgtttatatttatgtattttagtataaagaaagatatggaaggatgtttattaaaatgttaaatttttttatttttttttatgtatttttttgaattgggtgaaatgttttataatgagtatttgaaaatagaataaatagaaaaaaaaagatttaattagattttatttgttagtttttgtttttgttattgttgtttttggtgtttttgttatgaaatttttgttagtttttatgtatagaatggtattgtttaggttgttttttagggtttttataattttgggttttatatttaagtttttaatttattttgagttgatttttgtatatggtgtatatgtagttttttatatatggttagtgagttattttagtattatttattgaataaggagttttttttttattgttggtttttgttagttttgttgaagattagatggttataggtgtgtaggtttatttttgggttttttattttgttttattggtttgtgtgtttttttgtattagtattaggtggttgtggttattgtagttttgtagtatagtttgatgtgatgtttttagttttgttttttttgtatataattgttttggttatgtaggtttttttttgattttatataaattttaaaatagtttttttttttagttttgtgaagaatattattgatagtttgataggaatagtattgattttgtaaattgttttggatagtatggttattttaatgatattgattttttttatttatgagtatggaatgtttttttatttgtttgtgttatttttgatttttttgagtagtgttttgtaatttttattgtagagattttttatttttttggttagttgtatttttaggtgttttatttttttgtggtaattgtgaatgaaattgtatttttgatttggtttttagtttggttgttgttgatgtatagaaatgttagtgatttttgtatattgattttatattatgaaattttgttgaagttgtttattagttgggatttaatgaaatttaagagtttttgtatagtaaaagaaattattaatagagtaaataataatgatttatagtatgggagaaaatatttgtaaattatatatttgataaagatttaatatttagtatttataaggaatttaaatttataagaaaaaagtaattttattaaaaagtgggtaaaggatatgaatagatattttttaaaagaagatatatatgtggttaataagtgtataaaaaaagtttaatattattgattattagagaaatgaaaattaaaattataatgagatattattttatattagttaaaatagttattattaaaaagttaaaaaataatagatgttggtgtggttgtggagaaaagggaatttttatatattgttagtgggagtgtaaattagtttaattattgtggaaagtagtatggtagttttttaaagagttaaaaataaaattattatttgatttagtaattttattattgggtatatatttaaaggaatataaatttttttattataaagatatatgtatatatatgtttattgtagtattatttataatagtaaagatatggaattaatttaaatgtttattagtggtagattagataaagaaaatgtgatatatatatattatggaatattatgttgttttaaaaaaaattagattatgtgttttgtagaaatatgaatggagttgggggttattatttttagtaaatttatgtagaaatagaaaattaaatattttatgtttttatttataaggaggagttaaatgatgagaatatatggatataaagaggggagtaatagatattgggatttatttgagggtggagtgtggtaggaaggtgaggattagaagaaataatttttgggtattaggtttagtatttgggtgatgaaataatttgtatagtaaatttttatgatataagtttatttaggtaataaatttatatatatatttttgaattgaaaataaaagttaaaagaaaaaagaaagatttatttgtatagtgtttttttttttttttttttatttggtttatttttttttttatttattgtatgtattaattttttagaatttttggtgttttggggattttgaaagattagttagtaggattattgtggggtttagtgtagtgatgtagaggtttttattagtaattttgaagttgaaagagaatatttattttttttatgtataagggatagatttgggggtggtattgaaggttttttttttattttgttggtagttgtagtaatgtattgattagtaggagaggttttttttttaatgagttagaaattaatatttgtggagtttttgttatatattagtattgtgtagggtgttttatatttaaaaaataaatttgggttgggtgtagtggtttaagtttgtaattttagtatttttggaggttgaggtgggaggattataaggttaggagattgagattattttgtttaatatggtgaaattttatttttattaaaaatataaaaattagttgggtatagtggtaggtgtttgtagttttagttatttggtaggttgaggtaggagaatggtgtgaatttgggaggtagagtttgtagtgagttgagattgtgttattgtattttggtttgggtaatagagtgagattttattttaaaaaaataaaaaaataataaaataaaaataaaaaataaatttgtttaatttttataataattttataatgaaaaaattgttatttttattttatagttgagaaaaaaatgaggtataatgaaataaaagtatttgtatagtatataatataggaaggagtggagtgagaatttaaagttaagtttatagtatgttgtttttaaggtaaaattatttttgatttaaaattatatttttttttttttttaattttttttagttagtgttttatttgtgtggatttgttaggagataaggaaaattaaatttttagtaatgtgtatttagtgtttaataattatattattatatatgaaaaaaatttgaagtttgttagattattattgtatgaaatattttttatttgggattatatagttttgtatttttttgattagttataatttttaggatttagtttttattttagagatttagatttgtgtattttgtatttttttgtattttgtgttattgttttattaagagtatattttaggtgatttttttgtgtgtttttaattttgttattttgtggttattaataatattagttaataataatattattatattgtttattataatgtgtgtttgtgagtattggtaataatttagtagaatagaatgagttagatttttaattgtggtagattatgtgtagtagtgaatagagtatagaaattttggattttaatttttgattttttggtagtgatatttttttattttattatataaggtataagtggtagaagattagggagaattatagggttgtaagatattttataagttgttaaataaggggatattgttttatttggggtatgttatttaatttttttaatattgtgttaggtaggtattatgaattaaattgtggttatttaaaatttatattttgaattttgggtattttagaatataattgtatttggatatggagtttttaaagaggtaattaagttaaaatgaggttgttagagagggttgtaatttaatatgattggtatttttataagaagattgaaaatatagatgtgtatagagtaaagattatgtgaagatataaagaaaatagttatttgtaatttaagaagagagttttagagtatattgtgatttttgatttttggtttttagaattgtgagataatgaatttatattgtttaagttattagtttgttgtattttgttatggtagtttgaatgggttaatatagtgaggttttttggaagatttttagatggggatttgtatgtaagaagtttaatagggagagtttttaagagtaatttttggagggagagagggaggaaaggaaaattgggtagagagagaagttgatttttgatgtagttgttataaggtttttagttgattttagggtttttagttgattttatagggtgttttggagttgggatggttttgtagagttgtttggaattaaggtagggtttagggagggagataattttggtaaaggtagttttttttagtgggggaatttttagtgagggatttaattgtggttgtttgtagtgggtattggatagttggggagtgagtttttttgttttgatgaggggtttgggtgatattttatagtatttattgtagatttgtagtttttagtttgtagattaggataagtataatgtttgtggtgtatttttttgtaggtggttgtgaggagttaatgagataatggatatgaaaatgttttgtaaattgtgaagattattaatatgttgttatgtattattttttgttatttgttgttattttgtttttttattttttttaggttggaatgattatattttttttttttttagttttatttttgggttattagtatagggaaaaaataagaagaaaaattagagtggaattttaaaaaataaaggttttgtgtttttttgtttaaaatatgtataatttttagttggtattgttaggaatggggattgtttttatggagaagtggtatttttatttttagttagtttttgtgtgagttggattttaaggttaggagaatgaggaggttgtgaaggttttggttgtttttttttttttttatttttattgagatatagattgagatagggatttataaattattttggagttaaattaggggaaaaaagaaaagtttttttaggtaatagtattttatagtagtaataggaagttgtagggaaaagagaaaagttaaaatttaagtgaaaatttgagttatggtttagagaggttataaatattttttttatggagagttagaagagggaatatagagaaaattgagaggttttttttttgtttgtttgttttgaattttttaaaggagaatttgtttttaattttgtgaagttagtaaatatttttttaaagaatgtgtgtggttatataagttgaagggttagaaaattatttttttatagtttagatggttttaagtgggaatagataggaaggagtgtgagttaaagtttttatttatattataggattttgttgttttagttgtttttttttgttattagtttaggaagagtgagggttgttttttagatatagggagtttttgtaggttgattttaggtattttagaatgaggtgtttgtatttttttaagtgttgagggttattttattttttttttttttattaagattttttgaattatttagagaatatataagttaaaaataaattattttggtagatagtgagggtatagaagtttttggtaaggttttttttttaatgaaaattagttttaaatattttttttttttaataaagagtagtttgtgaaattaagttatagatatagatgttagtagaggaatattatttgggattaggtatgtttaaaatggtggttttatttttttttttttttttttttttttttttttttttttttggttagttagtttgtttttgttgttgttgttgttgtttgagatggagttttgttttgttgtttaggttggagtgtaatggtatggtggaggtttattgtaatttttattttttaggtttaagtgatttttttgttttagttttttaagtagttgggattataggaatgtattattgtgtttagttaattttgtattttagtagagatggggttttattatgttggttaggttggttttgaatttttgattttgtgatttgtttgttttggttttttaaagtgttgagattataggtgtgagttattgtgtttagtttatttttttttttttagtgttagttatgtgtatattaaggaatagataatatggtgtgggttaagtggaaagtttttttgtatagtaagatgagggtgaggtagttagttttttttttgttatgtaaatattatatttaattgaattgatttgtgggttttatgtaaattagatattgtttttttaaatttgtttaaaaatttggagaattttgttttagtaagttttttttttttagaagttttgtttttttgttagagagaaagttgttttttttttttttttttttgtttattaaatttgtgtttttaaaggttttttttgtgtttttgttttaaatttttttggtgttaggtaatgaattttgggtatttattttagataatgaagttgttttagaatgataaaataatagatatggggatttttggtaaataataaattataaatgaatagagagagattagaaaataaatttaattatagtagaggaggaggggagaaaatagtttttttttttagaaatataggagagatagaaagtaggttgttttgttttgtgtttgttttattttttagtaatatattgttttggtgtagtgagattttttgtattatagggtttaattagagatttagttatttttatttatgttgtgagttaagattttgagtaaatgggtttattttgattgtagttaaagtatttggttgggtatattttaatatgaatattatattaataataaaaattgtggaaatgtggggaaatgtttatgatatgtttataatttaaagtaggttagtagtgtattgttaatgtaaataaaatagtatattgagtgtgattttaatattgaaaaataaaataaagagtattaaatttgttaagtttaaagattagagtgttagatgtaaaatgtttaatgtttttttttgtgatgggattatttttttttttatatttttttgtattttttgatttttttttataataattatgtttttattgtaatttgagatataaaatattagaaaatttggttagatgagttgttttaggattgtgattatttttttataaatagatgttttttaattgataatgggattttgtttttataagtttattataagttgaaaatattgtatgttaaaaatgtattttatatatttgatttattgaatattatagtttagttttgtttattttaaatatgtttagaatatttagattagtttatagttgagtaaaattattttatgtaatttattggttattatattgaaagtgaaaattgaatggttgtgttgtttgttgaagtatggtttttataaatatatattgtttttgtgttattataaagttaagaaattgttaagttaaattatgagtgagggattatttgtatatttatatatatatggtatgaatatatgggggtgtgtgtgtgtatgtgtttatgtatgtaaatgtgtgttttaaagttttggggtttttttttttttttagttaggagtttttttttttttgttgagtttttgaattttgtataattgtttattatatttttgaaaagataattttttggtatagtatttttagttttttattaagggattttagtagatgtttatttttagtttagtttggatagggttattaaggagtttgtttttggtttttatagttattttttgaagtaagattgaagagggtgggagtattatggtttgttgatttttagttttgtttgtattttttttggtagaaggggttttaggtggtgtttatattttagattttagagaggatattatttttagagagttgaatttaaaaattgatgagttttaaagatgtgaaaaaggatagattttgttagatgagtatttttaggttgttggtatggaattgagggaggaaattgggattatttgtttgatgttgtagtttttttattttttttttgttattgtgagaggtttggattttttttgatataaatagtttttttttattaaaggattgtgttattttttttattttttaagtattaaaaggtagtttaagtagattagtgaattaggtaaatgtttatatttttttttgtttttttttttttgtatttggtagaattttttttgttttattgttgatttttttgtaaaagtt

SEQ ID NO: 118 - DNA, 42929 bp, Artificial Sequence
  chemically treated genomic DNA (Homo sapiens)
ggtttttataaagagattaataatagaataggagaaattttattagatgtaaaaagaaaagggtaagggagaatataaatgtttgtttaatttattgatttgtttaaattgttttttaatgtttagaaaatagaaaggatggtatgattttttgatgaaaggaggttgtttatgttagaagaagtttagattttttatagtgatgaggggagaataaaaaagttgtaatattaggtgggtagttttagtttttttttttagttttgtgttaataatttaagggtgtttgtttggtagggtttgtttttttttatgtttttggagtttattagtttttgggtttagttttttggaggtggtgttttttttaaaatttagaatgtaggtattatttgggattttttttgttaaaggagatataagtagagttggaggttaataaattatggtgtttttattttttttaattttattttaggaagtgattgtggagattaaaggtaggttttttggtggttttatttaagttgagttgggagtgaatatttgttggaattttttggtagaaggttgggggtgttgtattaagagattgtttttttagaaatgtggtgagtaattatgtaagatttgagagtttagtagaggaaaaggggtttttagttgggaaggaagaaggattttagagttttgaaatatatatttatatgtatagatatatgtatatatatatttttatgtatttatattgtgtgtgtatgaatgtatagatgattttttatttatgatttgatttaataattttttgattttatgatggtataaaggtaatatgtatttgtagaaattatattttaatgaataatataattatttgatttttatttttggtatggtagttaataaattatataagatgattttgtttaattgtaggttaatttaagtgttttgagtatgtttaaggtaggtgaggttaagttatgatgtttagtaggttaggtgtatgaagtgtatttttgatatatggtatttttaatttatgatgggtttataggaataaaattttattattagttgaggagtatttgtttgtggagaaataattataattttggaataatttatttgattaaattttttaatgttttatattttagattatagtagaaatatgattattgtagaaaaaaattaggaaatatagaaaaatataaagaaaaaaataattttattatagaaagaaatattaaatattttgtatttggtattttggtttttgaatttggtagatttagtgttttttattttgttttttaatattggaattatatttaatatattgttttatttatgttgataatgtattgttaatttattttaagttatgaatatattgtggatatttttttatatttttatgatttttattgttggtataatatttatgttaggatgtgtttaattagatattttaattgtaattaagataaatttatttatttagaattttggtttatagtgtaagtaaaaatgattggatttttagttgggttttataatgtgaaaagttttattatattaggatggtatgttattggagaatggagtaggtgtagaatagggtagtttgttttttgttttttttgtgtttttgggaagagaagttatttttttttttttttttttgttgtgattagatttattttttaatttttttttgtttatttgtggtttattgtttgttagaagtttttatgtttgttgttttgttattttgaagtggttttgttgtttggggtaaatatttagggtttgttatttggtgttaagaaaatttaggatagggatataaaggaggtttttaggagtgtaggtttaataggtagaagaaagagaaaggagaatagttttttttttagtgagagagtggggtttttgaaagggaaagatttgttggggtggaattttttaaatttttaggtaggtttgaagaggtggtgtttgatttatatagggtttatagattagtttgattaggtgtgatgtttatatagtaggaggaaggttggttattttatttttattttattatgtaaaagagttttttatttgatttgtgttatgttgtttgttttttaatgtatatgtggttggtattgagaaaaggaagatgggttgggtgtggtggtttatatttgtaattttagtattttgggaggttgaagtaggtggattatgaggttaggagtttaagattagtttgattaatatggtgaagttttgtttttattaaaatataaaattaattgggtatggtggtgtatttttgtaattttagttatttgggaggttgaggtaggagaattgtttgaatttgggaggtggaggttgtaatgagtttttattatgttattgtattttagtttgggtgatagagtgagattttgttttaaataatagtaataataataaaaataaattaattaattaaaaaaaaaaaaaaaaaaaaaaaaaaaaggaagagaagatggaattgttattttgaatatgtttagttttaggtagtatttttttgttggtatttatgtttgtagtttgattttataggttgttttttgttagaaaggaaaagtatttggggttggtttttattaaaaggaaaattttattgaggatttttgtatttttattatttgttgaagtaatttatttttaatttgtgtattttttgagtggtttagagaattttaataaaagaggaggaggtagggtgatttttagtatttaggaaaatatggatattttattttggagtgtttgaagttagtttgtaggaattttttgtgtttgagaggtagtttttgttttttttgagttagtggtagaggaaagtggttggaatagtagggttttgtagtgtgggtgggagttttaatttatgtttttttttatttgtttttatttaaaattatttgggttgtgaggaggtaattttttagttttttaatttgtgtgattatatatattttttaaagagatgtttattagttttataggattaaaaataaatttttttttaaaaagtttaaaataaataaataaaaaaaaaattttttagttttttttgtgtttttttttttgattttttataagaaaggtatttgtggtttttttgaattatgatttagatttttatttgagttttgattttttttttttttttataattttttgttgttgttgtgaaatgttgttgtttgagagggtttttttttttttttttgatttaattttaaggtgatttatgggtttttgttttgatttatgttttagtagagatgaggggaaaaagagatggttaagatttttatggtttttttatttttttgattttagagtttagtttatatagaggttggttaggagtggaagtgttatttttttatgagggtggtttttatttttgatagtgttaattgaggattgtatatattttaggtagaaaagtataggatttttgttttttagaattttattttgatttttttttttattttttttttgtgttagtgatttaggaataaagttagggaaagagaaaatgtgattattttggtttggggaaggtgaaaggataggatagtaataaataatagagaatgatgtataatagtatattgatagtttttatagtttgtagagtatttttatatttattattttattagttttttatagttgtttgtggggaaatgtattataggtattgtgtttattttggtttgtagattaggagttgtaggtttgtgatggatgttgtgagatgttatttagattttttgttagggtggagaaatttattttttagttgtttagtgtttattgtaaatagttataattgagttttttattgggaatttttttgttgaaggaagttgtttttgttaaggttatttttttttttgggttttgttttgattttaggtaattttatggggttattttagttttagaatattttgtaggattagttgagaattttaggattagttgagaattttgtagtagttgtattagaggttagtttttttttttgtttaattttttttttttttttttttttttttgggggttgtttttgagagttttttttgttaaattttttgtatgtaagtttttatttgaaagttttttagggaattttattgtattggtttatttaggttgttataataaagtataatagattggtggtttaaatgatataaatttattgttttataattttggaggttagaagttagagattataatgtgttttgggattttttttttgagttgtagatggttgttttttttgtgtttttatgtggtttttgttttgtgtatatttgtgtttttaatttttttataaggatattagttatattagattatagttttttttaataattttattttaatttaattatttttttaaagattttatatttaaatataattatgttttgaggtatttggggtttgaggtatgagttttgggtggttataatttagtttatgatatttatttaatataatgttgaagagattgagtgatatgttttaaataaagtagtgtttttttatttaataatttataaaatattttatagttttgtggttttttttgattttttgttatttatattttatgtaatggaatgggaaggtattattgttaggaaattaagaattaggatttggagtttttgtgttttgtttgttattatatgtgatttattataattgggaatttaatttattttgttttgttaaattgttgttagtgtttataaatgtatattgtagtggatagtataataatattattgttaattgatgttattaatgattataaaatgataaaattaaggatatataaaaaaattatttggagtatatttttggtgaagtaataatatagggtataaaagaatatagaatatatagatttgggtttttgggataaagattagattttaaaaattgtaattgattagaaaaatatagagttgtatggttttaagtgggaaatattttatataatggtgatttgataagttttaaattttttttatgtgtaatgatgtgattgttaaatattagatatgtattgttggaaatttgattttttttgttttttgataaatttatatggatgaaatgttagttggaggagattggggagagaaaagaatatgattttaaattaaaagtagttttgttttgaaaatagtatgttgtaaatttgattttagatttttattttatttttttttatattgtgtgttatgtaagtgtttttgttttattgtgttttattttttttttagttataaaatggagataataatttttttgttgtagaattattgtgaagattaaatagatttattttttatttttattttattatttttttatttttttgagatggagttttgttttgttgtttaggttagagtgtagtggtgtaattttggtttattgtaagttttgttttttgggtttatgttatttttttgttttagtttgttgagtagttgggattataggtatttgttattatgtttagttaatttttgtatttttagtagagatggggttttattatgttaaataggatggttttgattttttgattttgtgatttttttgttttggtttttgaaagtgttgggattataggtttgagttattgtgtttggtttagatttattttttaaatgtaaagtattttgtatagtgttggtgtatagtaggaattttataagtgttagtttttggtttattagagagaaaattttttttgttaattaatgtattgttatagttgttagtaaaatgagagaaagatttttaatgttatttttaaatttattttttatgtataagggaggtggatatttttttttaattttaggattgttggtggaggtttttgtattattgtattgagttttgtaataattttgttagttgattttttagggtttttagaatattggaagttttaaagggttaatgtatgtaatggataaggaagagaataaattaagtaagagaaagagagagagagtattatatagatgggtttttttttttttttttaatttttatttttggtttaggagtatatgtataagtttgttatttaggtaaatttgtgttatgggggtttgttgtatagattattttattatttaagtattaagtttagtatttaaaagttattttttttgatttttgtttttttgttatattttatttttaaataggttttaatgtttgttgtttttttttttgtgtttgtgtgtttttattatttagtttttttttataagtgagaatatgaggtatttggttttttgtttttgtgtgaatttattaaggatagtggtttttagttttatttatatttttgtaaagtatatgatttggttttttttaaggtagtatagtattttatggtatatatgtattatattttttttatttgatttgttattgatgggtatttaggttgattttatgtttttgttattatgaatagtgttgtaataaatatatgtgtgtatgtgtttttatagtagaagaatttatatttttttgggtatatatttagtaatgagattgttgggttgaatggtagttttgtttttagttttttaaggaattgttatattgttttttataatggttgaattaatttatatttttattaatagtgtataagaatttttttttttttataattatattagtatttgttattttttgattttttaatagtagttattttgattggtgtgagatagtattttgttgtggttttgatttttatttttttaatgattagtgatattgagttttttttatatatttgttggttatatgtatgtttttttttgaaaagtgtttgtttatgttttttgtttattttttaatggggttgttttttttttgtaaatttaaattttttatagatgttgaatattagatttttattagatgtatagtttgtaaatatttttttttatattgtagattattgttgtttattttgttggtagttttttttgttgtgtagaagtttttaagttttattagattttagttgataaataattttagtaaagttttatgatataaaattaatgtataaaaattattggtatttttatatattagtaatagttaagttgagagttaaattaggaatgtaattttatttataattgttataaaagaataaaatatttaggaatatagttaattagggaggtgaaagatttttataatgagaattataaaatattgtttaaaggaattagagatgatataaataaatggaaaaatattttatgtttatggataggaagaattaatattattaaaatggttatattgtttaaagtaatttatagagttagtgttatttttattaaattattaatgatattttttatagaattggaaagaaaaattattttaaaatttatatggaattaaaaaagagtttatatagttaaggtaattgtatgtaaaaagaataaagttggaagtattatgttaaattatattatagggttatagtaattatagttatttggtattggtataaagagatatatagattaatgaaataggataaagagtttagaaataagtttgtatgtttataattatttgatttttgataaaattgataaaaattagtaatggggaaaggattttttatttaataaatggtgttgggataatttgttagttatatgtagaagattatatatatattatatataaaaattaatttaagatgaattaaaaatttaaatgtaaaatttaaaattataaaaattttggaagataatttaggtaatattattttgtatataggaattagtaaagattttatgataaagatattaaaaataataataataaaagtaaaaattgataaatgggatttaattaaatttttttttttttgtttattttgtttttaaatatttattatagaatattttatttaatttaaaaagatatatagaagagggtgagaagatttaatattttggtgaatatttttttatgtttttttttatgttaaaatatatgagtgtaaatgatttttaaaaaagggttttatattatgtgttagtttgaaaattgtattttttttattaataatttattatatttatttattatattaatgaatatagatagatagtttttaatagttgtaaaatattttattgtatgttttagaatttatttaattttatattgttgaatatttaggtattttttatttatttgttgttaattataataaaatattttgttaaatgattttgtatatgtatttttttaaatttgtttaattgtttttaggataaatttttagattaggattgtttggttaaaggatattggttttataaaagtgattaataatttatttttttagtttaagtgttagggaaattttaaattttagttgttttattttaaatttatgatgataaaatggaaatttaatattggaattttattatatatttttatgtggtttgtttttttatttttttaggataattttaaatttttttattatgttttaattttattgtattattttttttttttatatgtttagttgatgttttggttttattttttaaaaaaaaaagttatgaagtatattattattttttgtatatttttaaattaatatattttttttatttttatatatatatatattggaatttattttttttattttttttttttattgtggtagagtttatatggttggtattgtttagtattttatttgagttatatttatgaaataatttaaggattttttttttttttaggtattgatatataaaattaatattaaaatttaataaagatagattaaaaagaaaaaataggtatagattaatattatattatttatttatttttttagtatatatttattgaatatttattatatattaggtattaagggaagagaatggtgagtgatataaattagatttttattttggaagtatttataatttagtggtagaaatagatataaatttattaaaaataagataagtagattgtttgtgatggatgttagttagaaaagagagattgattggatagatagtaatggggtggatttagagttttagaaaggaaggttagggaatgatgttttgagaggagatatatgaagaaggtagttatttgaaagttttttagagaagaagtttttaggtaaaaaaaaaaaaaaaaaagtaagtttagaaattattttgatgttggaggtaaagttgggaagttagggtgggtggagagtagtgtatgaaaaaggtaggaagggtataatagtgtgtaataggaagggggttggattttattgtaaattaattgagaatatgttaaagaatattaagtaatatgtttgaaattttatttttaaaagattttttgaggtaaattgtggaaattgaattttatagaaatttaaataattagttggagaatagttttattttttatatattaaattatataaaattttaataatgtaatgatggataaaaaaatttattgttttatataaaaaaaataaaaaataaaaaataaataaaaaaaaaattataaagaaaataaaattattttaaaggtatatattatagagtgtaaaaattttatatttaaagtagaggtgaattatttgttaggattttttagtgttgaaattgtatgtggagtttttttttttttttttttttttttttttttttttttggttttattaaagttttttttaaggaaaagaaaaaaaattagatttatgttttggaaaaaaattttggtatagattttaaataaatatattaaagttatattttttaatttttttagatttataaatgagttatttttttatttaagtataattaggaatggtttatttttttaattttaagtgagtttttgaaatatattatatgatatagaggatgggtggaaattagaaattgttgttgttgtgatagtttatgaattatatgattttgttttttttttataatttgttaatagtgtttgaaatttaagattattgtaaggaattaatatataatttaattagagttaaaaggatattatttaagttagtgttgttggtttttagtatgtaagtggtgataaattaggaaattttttttttatttatttatttatttatttatttatttattatttttttgtatatttaagattgttttttttaaatatttggatatttatgtaatattgtttttaggataaaaataagatggggagggggtttggagttgtttgtagatattttaatatatgtttgaagtaaatatgtagaaaaataaatgtttttatatatgtataaattattttatttttagagagttattgtttttaggtagttataggagatggattttttgtatgtaaatgtagttggtttttttttatgaaaggttttttggttttttttttgttttttttttagattttgtgggggttattgtggggatattttaagttatgtattttttaggttaattattttagtgaattaagtttgttgggtattaaggttgtggtttgtgttattattattttaagattaatgtttttttttattttattatgtttaaggttattaaggaaagattttaaatttaaagtggtgtttttagagttttgggggtttagataaggtattgttttttttagtattatttatattttagtagttttttattattgtaagttgttttgtggaattttgtaaatgaggttaattttttataatgttaataaaatagatatttatttaattatatttttagagtagaggtgaagggatataattggtgtagaaattgttgtaagagattataaggttagatattatatattttttaggtatttttggtgttttttttttttttttttgtgtaattttttttagtataaaattttttttttttagattagaaaggaaaagtatatattttttttgttttttattttttttttgttttttttttatagttgtttttgttgtatttttatttttttgttttggtttattgattttaaaggttttggagttttgtttatttaaattgggtatattttttttatgggtttagaagtttttttttttttttaattattagttttaagttgttattattttttttattttttttttttgaaaattagttttattgtgtttatgattatttttgagatgttttattaaaaaaaatagttttttttatattttttttttttttaaagtttgtattttagttggttaggagaagaaaggtttttgttgagttgggagttgaggttttatttattttttttttattataggaatgttttttttttaatttttattgttagtagaaattttgtttagttttttaattaagtttgtattttatttattttagttttttttagtttttttttttattttttgagtatgttatgtaaagttgtatgtgttatatttattttaattattaaagaaaaaggatgtttaattattattgattgaatttttagtgtaagtgtttttttttttttaaaagtaattttgaattttttttttaggttgagtgattttgggagaaatgaaatatgtaatatttttaagtataggtagttatatgtaaataattatatatatttttttttaaatattttggtgagatgatttttattttttaaagaaaggtatttttaaggatatagttatgaatattttgttttttatgtttttttatagttataatatttttattaagataagtagttttttaatgaatttgatttttttttgaagtaattgtttaaaatgtttttaattattattttaattaggttttttttggggattggggttagtattgtttattttagattgtgaatgtttattttaaatttatgtagtatttttattttattgtgatgaaatttatagggtttaaaagttaatttttttatgaatgtgtattaggtgttggggaaggttgggaaggagaggttgggtggtatagatgatagagtttttgagggtttagttgagtaaagatatattgaatataaaattaaaaataatagtatgaagttaatggaataatagtgtgaagtgtttaagggagtttagaagagaaaattgttttataatggaaagaggagggtaaaaggaagggagttttatagtagataaggagaaggggtatttttggttgaggaaatagttttgaaatgtaggttatatttagagattatttagtagtttggtgtggttaggggggaaatttgataattttatggggaatgagatagatatagaatgtttattttaaattttattatttgggggtttagaatttttttttgttttatgttagtaaggttaagaaaagtatttttaaagaagaattttaaaagatttgtatggttagtgaaatttttgggattgtaggaagaaattataataataattaaaattattataattattattttgttaaattttaagtgatttaagatatatatagtattttatagttgaaggaattttaaagattattttatttagtttgtttattttatagatgaggaaattgaggtttagagaaaagttttttgttgtaaatttattgttagttgggaataaagttaggttggagtatagattttttgttttttaagttagattgtttgttatgaaaatgtgttaatttgtgtatttttattattgatttgttttgttttttagagaagaaaaaataatggttagagtttaagaggtttttttgaagttatttaatttttggtggtttagatgggatttaaatttgggatgttggggatatgtagttaatatttttttgtaaatatttttattaaaattaaatttatttatgagggatgaagtgtgagatagaagagtgagtgtggtgattagagttttttaatttatgtatttttagttatgatttgagtaagaaatataggggttgaaagaggtttgttttgttttagttattattagtttaattatgtatggttaagttttaaggagttttttttttttattaagggtttagttgtaatgtggtttaaattagatattttttgtttgagtagaataaattatttaggttatatgttgataaaaaaggaatagtttgtatgtttggaaagtttagggggaattaaattatgtgttgttattttagagttgtttttttgttttgtatattattattttttaattgtttgtaggagttgtagggttttgtgtgtaagttgtgttataatttaaggtttaatataaattttgggtttttaggttattgggaaataataggtatatttggttgtgttttttgtgtttgtttgtatgtaaattaaaagtttgtgttatgttgaattttttggagtttttggttatagagaagggaggatgttttagaatggaatttttatataattgttttgtttgtttttttagggaattgggtgatagtgtgtgtttgtaagaagtttatatttttgggaggttgagtttagaaggggtgggatgtggaggtggttatgtgttaggtgattttttagggagtagggttttaaaggattttatgtttgaattttgaagggatggtagtgtttatgggggtggtggggaagggtggggtttgtgtagattttagattttttggttagtagtaataatgttaagtgtagagttaggtggggaggggtgtaggaagggatttgaaagtttgggggttatgtatttaggttgttatttttttaagggaggttttttatttttttaagttttgtgatgtttttattatagtttagttttgaattttttagatggttgattggagtaggaatgaagtgtttattttgtttttatgtttttttttatgggatataataatattttttttgttgtgattatagtttttttttagttaagtaggagaaatttatgtttattgtattttaattgtgagattttttttggtaggagtttgtttagttggtgtagttgggaagtagtagagagtttttgtagtttggtggaattgaatttaaattttagtttaattaatatagtgtgtgtgattttgattgataattttaattttttttgttttgttttatttgtttgtaaaaaagggatgagggtaatggttattttaaagggttggttgtgtgggattaatgaaatgatttttgttaagtgtttggtatattgtttggtttaaaatgttttatatatggtagtttttatatatatgatagtatattattattgttattattggtttaattggtagagttgtgatttaaaaattttagattgtggtttgattttgggttttgattttaggttgtggttaagaagtttttttggttttatatttaattaggatttatatgttttttttattgagttgggtttttttagttttttgatttaggtattattttgtttttgggttgtaggggtttgggtattattttgtttgttttttttttttttttttttttggggttaaggtatattatttgggtaggtagttgttttgggaagatgatatttttttagttagatatttggtggtggtaattttgtaatagtttagagggttgtagtggtgttttaatgtgtttatatttgttttagggttatttttttaaaattagtaattgggatattattttttttgaaatttattgtatttttatttattttttatgttaagataatagtttatttagattttttttggatgaagagatatttatatatatatatatatatatatatatatatatatatataaataaaaaatatatttttttttttttttttgagatggagtttggtttttttgtttaggttggattgtagtggtgtttttttggtttattgtaagttttgtttttggggtttatgttatttttttgttttagttttttgagtagttgggattataggtgtttgttataatattaggttaattttttgtattttttagtagagatggggttttattgtgttagttaagatggttttgattttttgattttgtgatttatttgttttggttttttaaagtgttgggattataggtgtgagttattgtgtttggtttaaaaaatatatttttaagtttagataatggtttttaaagtgtggtttaggtattttgttgggatggtttttgagattttttttaggaaatttataaggttatagttgtgggaataaaatattatttgtatttttaatttttatttttttataaatttattggggggtttttttgtagaaatagatgtgagttatttgttattttttgttaagttataaattaaagagatttgtaataatattttttaaaattgtttattttgattaaatatttgtaattttggaaattagttattttttataaaatgttatttatgttaatatgtattaggtttattatttttaatgaattaataaatattttataagttttttagttttaatttttagaattataaatattgatagatatttagttaaataatagttttttggattttataatattttttaagattttgaagaggttttgaaaataaaatatttgagaaatattgagttaagattttggtattggggtttatgaaattattgtttttgtttatttatttttaaataaaattattatttttgaggattggaatagtgtgaattttatggtaattttaatataatgggtttgagtgtagtagatttagttatgaagtttatgtggaggttgtatgttaattttttgtatgttttagttattgtgttaaaggaagattttttaagttattttaagatttgattgtaaattgtggagattaaattgttgggtagatattaaggatattttgtaaggggaggggaggaagagggtgtgagttgtattaggttttggtaataagatggttttgtttgttgtggttttgggtttttggagggagttagtttatagggtaggagaaggtagtggggtggtttaggtttttaataggtataatagtattagagatttttatagttattgtagttagaggggtggggtttttgtaagatttaggatgatatgtagtgagttaataaatgtgtattggtgtggtatagatgggttttggtgtttgtagatttgaatttaaattttgattttttttatttgtaatttttgtgatatttggtaaatagtttattgtttttgagttttaatttttttgtatataaagtaggttaaatatattaatatttttaggatgattgggagaaataaatgaaattgttaatgtaaaaaatagaaaatagtgtttggtatttagggggaaatattagttattttttttgtttttaaatttgttgtgtggtgtgggagattttaagggaatggaggagtttaagttataggttttggttttatgatgataatattagagagaatgttttttatatttagtaggatatagtgttttgattgtggtatttaaaattgttgtggtgtttattttttgttgagtgatatgtgttatttaggaggttgaggtaggaggattttttgaatttaggagtttaagattagtttgggtaatatagagagattttgttttaaaaaaaaaaaaaaaaaaaaaaaagatatgtgtaagttgttttttatttttttgatttgttgtaggaagttttaggtattaggtttagagtttagagtaaatgagggtagaaatggaggtttttattagttttgagtgttttttgtgtatttgttgtggaagaggattttattttattttgtagtttttgggattttattggggtgtggttggtaatttgggggtttagggtttagttatatttttattgtattagaaagtttttgaaatagtgtaggagaatgaggtgtttgggggtatggttgttggttggaggttatagtgttatttttttaaggtttagaaattgggaagttttttttttttttgtatttaaatttttaaaatgtataatttattttttgtggttgatttagtataatgggaaaaggaaaaatggaggttagttagtttaagagtatagattattgaatttaattttttattttggattggagagtatttgagataattttttttttggtttttagtaagggagagttgggagttttttgttttgttttttggtataggttttagaagtaggttgttttttttattgtggttgttaaatgggttgtatgttttaggtttgaggttatagtatattttgatttagagttgtaatgtaagaaaaaaaggtggtgttttttgggaagttggatagtgttgtgttatttgtataaattattattgggaggttttatgatagtatttttttgagtttttttttaattgtattgtatagtatggagttttttgaattttttttagtagggaattgtatgagtgttgttttggagttttattgttatagggttataaagtatttgtaatagttatagagggattgattgaaagtatagtttggtggaagaggtttattatggttttattaggtttttttgggaatatggtatttttttgtttaaagaattgtttttgtattatttaagggttttgatgtggagtgtgtttgggtgaggagaaattagatgaggagaaagtgttgtagagttgttatttgggagttggagggaaatataaattggttattggtgttgagtttttttgttaatagtagatgtttttgtgagattagtttttttaaggtagtggtaaatggttttttatagaataatgataatagttaatgatgtttgagtatttattatatgttaggtatttttttaaaagttttatatgtattagtttatttagtttttattataattttgtataattggtattggtattgtttttattttatatttttatttatttaagtgtaagttggatttagagaagtgatttttagtatggaagttattttggtgtaagtaggagagttagatttagatttagtttggttttggagtgatgttagtagttatttaatgtgttgtttgagaaatgtaaggaggaagtgattggtgttattttgggttgttaggaatttgtaggtgggtaatggtatgttattttgagagttgttatgttgaattaagtgggttatgtttttatttttgtgaggtttaagtttttgttatgttttggattttattggatagaagtaaggatttagtaagtagtagtaataatgataatggttaattgttattgggtgtttattttgttattaattatgttatttgtttttttataattaatattttatttaatttttaaaattattttttgtggttggtatattatttgttttgtataagtgaggaaagttaggtttagaagggttaaataatatggttaaggttatagtttataaataagagagttggtgtttatatttaagagtgtttggttttagaagttaaatttttaatgattgggtatgttggttgtattgtttttgatattttttggaggattagataagtttagaaggtatttgggtttgtgtttatggtttgtaaagaattgttatttatttaagaggggatatggaggtgtgtggagttggttttttaattttggtttttgtgatgtgttttatagggatgtggaggtttggaattatttttgtttaatgttttattagtttttatttggggattttttttatttgttaggaagaggagataatttgaatataggtatatgtattttttaagagaagaaataggtttgaaagataagtaaaatttttgttttgtttgttttgttttatgttggtaaatttaagttaaagtaattattttttatagaaggaaaagtatttaggtatattttatttggtataaagttaaggtttatagagatgggaattggtaaatttttttagaagatagtgaggatgtagtatatatgtatatatttttatggtttaagtatttttattgagaattgatattgggggaatatttgtaaatggatttagaattgtatagaaaagtgaaattattgtagtggagtttttaataatagagttgagaataatataaatgattatttaagttgttgttgatggttgaaaaaataatgttggttaggtgtagtggtttatgtttataattttagtattttggaggttgaggtgggaagatggtttgagtttaggagtttgagataagtttggataatatagtaaaattttatttttaaaaaatatttaaaaattagttaggtatgttgttatgagtttgtggttttagttatttggaagtttgaggtaggaggattgtttgagtttgggaggtggaggttgtagtgagttaagattatattattgtattttagtttgggtgatagagtaagattttgttttaataataatagtaatgataataataatgttatggttatattatgtagtagtttaaaattatgaagtagatttatttatttatttatatgtataattgtatgtatgtatataaatagaaggtatatggtatttatggttattttgggaaggggtgggagtgtgagtttttttattttatttttatttttttgtatatttttatatattgattgatttttttgtaataagaatttatgttattatgtgtgtgtgttttaagaataaatatttggttaaaatagaaaaataatttaatatgtataatattttggatgtataatgatgtaattatataatataaattgtagtttaaagatttttgtttagaagtagtttagattgggttatgttttttttggatagtttttttgttttgttttagtttgtgtttttgggagtattaatatggtttttgtaggttagaatattattttaaagttataagatgtatttaatagaaataaatgtaaaattttatatgtagtatttttttgaaaaattaataatataagtataattgaagatttagttagttattaagttttatattaaaggatgaagatttttgtttattataattttagtagaatatagatgttttaatagtgggatgtaaatatattaaaatagggtaaaaattttgtttgtattgaaagtaatattatgtttaatgggaagtaattatatttttttgggttagatagaatgttatatttgggatattatgtttagttttaggtttatatttagatggatatattgaaaaagtatattgtttagaaggtagagataaggaattggggtatttttaattggtggaaggatggtttagaagtagtataattttatttttaaatatgtgatagtaaaggagaatgagttttgttttatgttattttaaagaatagttttagatttattagaaggtaagaaagtttattttagaattttttttaatattgggaagaattttttagtatttatagttttttaattaaagtagtttaataatagaatagataatagttgagaaatgattattttaatagtagaagggaaaaattttgttgggagttaatggttaaaaaagttgatgtataattatttagtttttgtgttttttgttgggattatgtaggggaggattaattatttaagttatttaattattaattatttttttaaattttggatatatttagagtttttaattggaattttggtttatttgtggaaagagaaaaaaatttgtgagggaatgtagatttaatgttaaaaattaagaggtgaatggagagagagagagggagagagagagagagggagagagggagagagggagagagggagagagggagagagggagagagagagagagagagagagagagagagagagagagagatagatagatagatagatagatagatagatagatagatagagagagaaagaaagattagaatttggatgttaattatttaaaaatttggaggttgtattagttaatatgtttatggttagatgttgtgattttagttgagtttaaatgtatatttttttggtggtggggtgttttatttgttgttttatgtatttttttggtaatttggtaaatatttatttttagaaaatgaaaataaaaaggaaaattagtattttttatttgtttaaaggttttttatggttggttaaagaattagggaagtaaagtgtttttttattgattaaagttgtggatagtaggtttttttttttattgttagaaaagttgattttaggttgggtgtagtggtttatggttgtaattttagtattttgggaggttgaggtaggtggattatttgatgttaggagtttgagattagtttggttaatatggtgaaattttgtttttattaaaaatataaaaattagttaggtatggtggtgtatttttgtagttttagttattggggaggttgaggtaggtgaattgtttgaatatggtaggtggaggttatagtgagttgagatggtgttattgtattttagtttgggtaatagagtaagattttgaaaaaaaaagaaagaagaaggagaaggaaaaggaggagagaaaagtttattttaggaagtagagtaggtggtagtagaagtttagagaataaatgtataaaaataattatagattttggtgttttttttttttgtatggaattattattgtgttaagttggtgggagttttattttataaatattaagtagtagaggtatatgtttaaatgttgagtaggagaggtaagtatattagttgagagtttagataaagtgattgattattgtgattattttttagttttagggttgggtattttttttttttttttttttttagttgttgtatttttttgttttttttttttattttttttattttttttttttttgttttgattttttatttttttgtgtgagagagaatgaagagaggaagggagatagtagaatagaaaagggggtatttgagatgagagtggaggttttgagggaatgagggtgaggaagataggagtggatttagagaaagggaaaatgagagatagaatgagagagaagaaagaaggatgaagtaaggggaaggaaaagggtagaaggaagtaaattaaaggaaagaattgggaatgatgttgggaaaaattattaaagtatagtattatttgttgtatttatgaagtatatagaattttgagtagattatgttttttaatataggggtatagtagaattaagggtatgatattgttttatattatattttttttgtttttaaaaggaattgaagaaagtttaagataaaagagataagatatatttaagttatttaaagaataaggatggtatagaaagtataggttataatttatagtgttgaggagaaagattgtaattgagtataaattttttattagttttgaattttaggagtgatatattagatgtaggattttgaatagtagattaattttattttttttttattgtttttgtttataagaaatttttaagagaagttaagaaggtaatgtaagattaaaatgttgggaagatttttttttatgtttttatatttaatttttaattttgatataattatagaagagttttaaggaattataaagaatttttatttatttagattttttaattaatattgattatatttatttttttatttttttttttttttttttttttttttttaaatttttttattttttttttgagttatttgagggtaagtggtagatattatatttttttatttttaaatatgtattttggtgaggaattagaatatatgtagtttttattatatgtatttttgttatttttattaatattagatagagtttatgggtaatgagattggaaggggagtaggagtaggaaatttgttttaagttgtaattatttagtaagtgattatttttttttagattaatttaggttaataaaaatagtagaattttttaaattatttttttattaattttatataggattgagaaaatattaattgtttatatttgtttatatgaaataatattaatagaaatgaggattggtagttaatatttttggtgttaattattttaagaaatttagaaagtgtttaatataaagaaagaatttttgttagtttgtattgttaggtttttgagtttaagttaagttattatattttttgtgatttgtatgtatatatttagattgttggtttttgttttaattgatgatattttattataaaagaagtgaaaatggtttgtttttgttttaattgatgatattgttttgtgaaatttttttttttggtttattttggtttaaaagtttttttattgagtattttgtgatttttatttttgtttgttagagaataattttttttttttttttatttatttaaattatataaaatggttttatttgttttttttggttgattttttttttggatttagtttgtttgtatttaggtgattaaaagttttattgtttatataaagtttgtttgatggtttttttatatggatatgtatgaaatttggtgttatgagttggattgggggattttttttgggagggtaattttttgtttttttgttttttgttttatgagaaagatttatttatgattttaggtttttagattgattagtttaaggaatattttattaattttaaattgggtaagtggtttttttttatttttttttttaattttttttattgttttttaattatttttttttttttattttttaatttttttttttttttaattttaattttttttattttttggtagagataaaggagatatgttttatttgtggatttaaaattttggtgttggttagggattgggaaggtagtttttttttggtgtttaattattgtagggattgtaatgattatttatttaggttttagaggtgttagattatgtagggatgtttgttttggttttttatttttagtggtaagttttgtttttttggggaaggggtaagtattttaattttttttttttgtgtttttattttttttttttttttttggggggtaagaaatttttaatttttttttttttattttgagtggtaagttttgtttttttagaggaggggtaagtattttaattttgtatttttgtattttaattttttatttttgtgttttgattttttatttttgtgtttaattttttatttttgtgttttaattttttatatttttgtgttttaattttttatttttatattttaatttttaatttttgtgtttttattttttatttttgtgttttaattttttttttgtgttttaattttttttttgtttttttggaaggtaagaatttttaaattttttttttttatgtttttatttttttttttttttaagtttgttttttttattatgggtaattttttattttttatttttttttttttttttttagtttgtgtttttaaaaatttaaaatttttttaatttttatttaaattaaaatttaagtattttatttttttttgtaatgttgtttgattttaatataaatttaatagtagttttaaatagttggaaaatggtatttttaatttttttattttataagatttaaataatttttgttgtaaaatgggtaaatggtttgaggtgtttgatatttaggtatttttttatatattggtttttttttagtttttgtttttaatgtaatttattttaaatttttttttttttttttttatttgtttttttagttttaattttaagtgttgttgaggttttttaattttttttttttatggatttatttgatttttttttatttttttaggttgttttttgttaggtttagttaggttttaatttttttttagtttttgtttttttattttataatttttttattattttttttttttatatttggtttgttttatagttttgttttgtgattagtttttttttatttgtttagtaattgatttttaaaaaggtggttggagttaaaggtatagttaaggttaatgtttttttttttttattttaaattagatagtgtttttattaaatataaaaatttagtttagtttgtgatttttttggtagtagttttgagatgttttatagttttagattttaaaaggttaaaaggttgttttatttttaatatatattttattatttaatttgtttttgatattaaataaaattttaaaaattagaatttggtatttaaattttataataggatttaattaattttgtttttaaggtgtataataatagaaaaaagttgtaattttttgtttttattgtgagataaattttagttatatttttagtatataagaatttttaaatgtttgaattgtagtggttaggtgtttttttagaatttttttttttaggagtttgttataagtgttagaaatttggttattaggttaaggaatgtttgtagtttaggattttttttaagttatgttttatttgtgtgggattttattggaaattggattgtttaatttatttggtagttatttttagagtttttggaattttggtttaaggttttttgattgttttttagatttttttggtttagtggttgaagattgatgttgtttgattgttttggaagttttttagattattatagatgttgagttttgtgtaatttttatagtggaaagtaagtttgttttttttttaattaatatggaggttatttattttatattattttttttttaagggtttgttttttttgtttttataattgttgtgggtattgatagttaggtttttaaattttttaaaattttttaattttggtggtaatttagataatatttttttaagtatttattttagttatttatatttgtttagtttttttattagggtgagttattttaattaaattatttgtttttttgattatttttggattatagttatattttattgttgtttttttttttagtttaaagttttttttgtgttttttttttatatttttttattttaatttataaatataagatatttttattttttttttggtgattgattatgtattttttattattttattaaaatttaattatttttattttgattaatgttaatattttattttatagtatgttttgaaagggttaaagtttgttattatttgtttgttatagtatggttttttaaagtttataaattttttttattatttttttattttatttgttttaaaattaagtaagttttataagttagtttaggatttatgttttattaattaaattgttttgtttatttattttatggtgttaaatttatatatttttttatttttaatatttttttttataatttattattttgttttggattttaaatatgttttttttattatttttttgaatttgttattttagtttttttttgtttttatttggattgattttgatatttattaggtttagtaaattatttgggttgtattgttgtaaggttttatagatagtttttattattttagttaagtttaaattttatttttatttgttatttattttagtataatttttataaaaatatatgtgttttttttgttgattgtgtttgattaattttttaaattttaattttttataaaataataatgttttttttttttaggtatggttagtgtggttagaatttttatataagagttaggattgtattttgtagtttttttatgtaaataatttgattttattgttttagtttagtttttatgtttttatgtagtggttgttgttgttttaatatttttagaggttttaaaaattataaattatgtttaatttattttttatattttttataatttttaaaatttatttttttttttatatttgatgtatatattttttgttttttggtttttttagttgtatttagtttttgttaagttttataattattattgtttttggtttggattttaatttggttttttatattatttttgatattatatttgatttttatgattgtatttttttgatttatttgatatttattttatttttttatattttttttttttttgttttttattttgattatgtttgatttattgatggtagttttattaggtttaattgttatatattagtaaaggtaggttatgttatagtataagttattagtttgttttttagaattttttattttttttttattatggaaatttatttttaaggaaataattttttagtgttttatttgttattttattattttttagggattatttaggttttttttttttttatatattaagtttgaggatttgtttttatttaggattggtaaattagttttatttaatatgttttaagttaggaaattaaaatattttttagtttaaatagatatttttattggataggtagaggttttttttatagggtttgagaaggttattgtagttatttttttttttttgttagatataattttttagtttagtttttttatttttatatagtttgataatagattagtttttattagttaaattagttaagtagttttttaggtttttagtatttagtgaaatttttatattttttatggttttttgtttttaggaaaagtagaatggattaaaggttttttaaaaatatattttattaagtttagttattaatttaaaaaggattggataatatttttatgattttttttttttagaagttagatttgtttttagaatgttataaggtatagtttatttgagtttttgtatagatgtttttttttattaggttttagttttattttagatattagattaatttagattgtgttttaaaaaaatttattatttttattattttttgtttagttatatttttatttattgtttttaattatttatatatgttttgtttttatttatattgttggtttatgttgtttttttaagttattatagttgatattttttggtgttatttttaaattgttatttttaatttttgaagtaaataaataatttttgttggtaggattgtgttgaatttttttaggtattttttaattagatgttttgagttgttttaatttttagattttttatatttgttttttttttttttttattttatttagttttttaatttatataaaattgtatttaggttattattaataattttaaatgataaatgttttttttaataattttataatattattttttattataaaatttttttttagtttaattttttttattttaggtttttatattgtttttaattttgttgaagtagttttgagaaatattgtttattatttttttatattatttttaaaaatttttgttgttttaaaattttattattatttagttttattttttttattaatataagaagataggaatgttagttttttgagtttaagtaaagttattatattttttgtgatttgtatgtatatatttagattgttggtttttgttttaattgatgatattttattataaaagaagtgaaaatggtttgtttttgttttaattgatgatatttttttgtgaaatttttttttttggtttattttggtttaaaagtttttttattgagtattttgtgatttttatttttgtttgttagagaataattttttttttttttttatttttttaaattttataaaattgttttatttttgttttttttggttgattttttttttagatttagtttatttgtatttaggtgattaaaagttttattgtttatataaagtttgtttggtggtttttttatatggatgtgtatgaaatgtataatgttttgttagttttaaattatatttttaattttttattttatatttttgaaatttggatgtattttagagttgatgatgtaattataattggtagttttttttttttatgttagtatataaaaataagggtgtattttataaatgatggtttttgagattagataaaatatttttttattagttttgtggttttttgtttgtgtattgttaggaggaaggaagtggagtattttaggtgaggtatagggttttggtattaatttttaagattttttttatggtttagtttttggtgtgtattattttatagtttttttttttattgtatttttagttatttggtgtgtttttttatttttgttttttttgtttattagtatgtgtttgatgattgaattttgtttatttaaatgttaagagtttattagagatggtttatttttttttattttttttagtgtatgtgggtatgtgtgtttggagatgattggaaaagtatagtggttatttattaaattgatttaggggttatattagagaggaagattatgaagaaaattgagttttagtttgatagtagaagggtagagttttttgggttattggttttaagggtaatgtatatatttgttgatttaaaataataataataataatggttttgggtttttttaggttattttttaatttaaagaaattagtgggtagatatgtatatatggagtggattgggttagttttttggttttttagtatgttttgttatttttttttttttgatgatagaataagtttttgtttatagggtaaaaatttgatgttagtttggttttttggagtttttttaggattttggaagagagttgttttttttttttttgttttgttaattttaagttgtttttttgttatgtaaagagagaaagtttaagtaaagattagtataggtagagagttggtagagtggtttgggtttttgtattttgtgaagtattatggttatttttttttgtatatgggttagtgtatttttgttttgtttaaataagtttaagttgtttttttgagttaatataagataagatattttaaatttttttttattttaaattatttttttagtttagttgttttttttgaaagttatttgtaataaataatttaagtttgagatttgggagggtagaatgtttatattttgtgttgattgaaaggagatttttgggttttaggtttttgttttggttgagaagttgtgatgataattaaagagtttgtgtagatttttattagaggtagggttttgttttgagttgggttggggtgttaataggttgttttggatttatttgaagtttttattagggtattggatggggtatttaatgaagtttgtattataaagttttaagaattttaggtttgaagattttttgtaaaaagtgttattatagttagttattttggtttgttataattgataagggtttatttttttgatagtatttattaatttagtttttttgatttttgagttatgttttagaaaaagagttgagtttaaggaattatagtttggaggatatatttgatttatttgtgatggtaggaaagtatgtatttagttgatttaaaaattagatggtattattgaggagttggataggtggttttaggaataattttgttttatattttttaaaaataggaatttatttaaaggtaatttttatttgtttttattttggtagaggtattgtgataaaggtttttaggaatgttaatagtttaggattggtattagtttatagataatttttgtttattaaattaaagtttatgagagattgatgtatgtattagagttttgaattattaggtaaggattttgttaaagttggatatgggaaggttgttatgaaatttattttaaaggttgtgtaggttaatttatttttgggaaattaatgtttattattaaattaatgtaattgtttaaaaattaaaattttattattatttaagttttttattatggtgtgtgaaattatttttagaaaattttttaaaagatattgaataaaaggtattataggttgggtatggtggtttatgtttgtaattttagtattttgggaggtttaggttggtggattatttgaggttaggagtttgagattagtttggttagtatggtgaaattttatttttattagaaaaatataaaaattagttgggtgtggtggtgtgtatttgtaattttagttatttgggaggttgagttaggagaatttggtaggtggaggttgtagtgagttgagattatgttattgtattgtagtttaggtgatagagtgagattttattttaaaaaaaataaataaataaaaataaaaataaaaaaagttattatgaaaagatatttttttattaggttagtaaattgattgttggttttaattttttaagaagttagattttttttagatatttttttgtgtttttttataatgtaattagttattttagggttagttatgaggtatatttttttggttttttttataagtaatttaattgtaaagggttagtatattattttttttttgttatttttagaatttttaattatgaaaataaaaataataattaaaaagtttttttagttgattttttttttttttttttttttgagatagagttttatttaaattttgttgtttaggttgtagtgtagtggtgtaatttttgtttattgtaatttttgttttttatgtttaattaattttgttgtttttttttttgatttttgagtagttgggattataggtgtgtattattatgtttggttaatttttgtatttttagtagatggggttttgttatgttggttaggttggttttgaatttttgattttaagtgatttgtttgtttaagttttttaaagtgttgggattataggtgtgagttattgtgtttagttttatgtgtatttttttttttaagggaggtaggaaagaaggtatttgggttttttatttgtaatttttttttgtgtaaatttatgtgaaggatttggagtgggatttggtggttttaagttttggttttattttttgatggttgtgtgatttgggttaagttatgtaatttttttgaattttagtttatttatttgtaaataggttaataatagtatgagatttgtagtgtgagtggagtttaaagtgtagggttgtttttggtgaatttattatttttatatttattttttgatgaagttagtataatttttatttggttaattagatatattttatttttttttttgagtttgtttttttttttgttttgtgaagtttttgtttttttagttgttttgaaaattttatgtattagtatgtaggaaagggtgtgttaggtgggggaagttatttttgtttaagtgtttttggttttttttataaagggagggttttttttgtgattgtaagtgtgtttaggaagattatagagttgttggtgtgtagtgaggtggtgatatgtgtttgggtttggtttgtgggtggtggtttaagtgtttgttttgttggtttggtaggtgtgattgtgtgtgtgtagttgagggtggtggtggttggtattttatgttaagggtggtggtggttggtattttatttttggttgttgtttttgtgtgttaggtgttgtgagaagtgtgggaggagtggttgtaggtagtgtttagggatatgattggagttgattttttagaagtggtgtatgtaaagtttagttttgtatgtaaaggggaggtgatagtagaaattttaatttgataaagtttgttggagtgtggagatttgtttttttttgttattttttgttttgtttgggttttgttttgttagtttttttaggtttttttagttgttttagtttggttttttgttttgtgttaatggtttttattgtagtttgggtggttttgtgtttattagtgggtggtgttatttggagtggtttttatgtgggaaattttagggttagttgtgttttaggagtttttgtgtgtttaagtattgttggggttttggggtgggggagtggttatttttagggatttttgattttgttgtaagaattggaaaaaatttagtatgttaaagagtttttattgaggtggtaatttgtttgtgagaatttaagataaaatttaaataattaattaggggtgttgtgaggtaaattgttgttattatattggttttttgggaagtaagtttaagttgtggagagggaagggaggttgtgtgtttggggtggggtgtgtttttaagttgagtgtagtggttggggtaggttgtattgagtgtggttttggggatattgtgtggttttgattggaggtggttgtgatgaagtgtggttattgtataatggaaatgtgggtatttttgtttttatgaaagtttgttggtagagttttgaggttggttggtgtgtttggatgggagtttgggttaaagtggtttggtgtgtggtgtgttttgttttttgtaggttttgttttgttaggttgtgttgttttttttttatttagtttttaaaatttggaggagtgggatggtgtgttttgattttggagtgggagtgggagtgagtgtttttgtgattttagttgtgagagttgtaagggtatgggaattgatgttatttattgatttttagttttaattttaatgttgtgaggaaattttgattttgttaggtttttaagggtagtggggtttggtgagtgaggtatttttttttgtttttattttaatttaagtgtttttggtattgatgatgttaagagatttgagtgggagttaaagtttttagtgagggtagtaggtgtttaggttgggttgtgggtttttgttgatgttttgttttaggtaaaggttttagtttttttttggagttggttgttttgtgttattggaaattgtatttttttgtaggttagtttgtttgttgaggtgttgtttggtgatttttttagatggattattataggtagtgggtggtgtggtaggtattttaaaggaaattaagtgttattgttttgatgtttgtagtgttgtttttagattgtaggaattgttatgtgttttgtggggaggggaagggtttggtgttgggttatagtgaggtggaaatatgtttttttttttttttaagggagagtgggttggggatgggaaggggtgtttttggttatttttttagagagttagttttgatttttttatttaatggtatttagtttttagaggttggggtaggggtgtggggtgtttgtttttgtttttgtatttttgagtgttatgtttttttttttttgtttttagtatgggtattagttttagtttgaatgatttttggttgttaaatttgttgtttatttagtagattatgtttttgttatttttgttggtgttggttattgtgtatgtgggttagtggttgttgaggtaatggaggtggtagttttggtttgtgtttttgggtttgtttgtgtggttattgattggaaatgtggtggtggtgggttaggtggtttattttttgtttgtttgtttggtgtggtgttatggtgatgttttttagatttgtttgggtagttgttttatagtggtgttgaatggtgagtgtgttatttattaggttttggtgtagtagggtttggtttttgttgattggttggtttttgtttttttttgtgtggtgtttggtggttgtagtatggtttttggttattatttggagtattggaaggtgtagtggtgtgtagtttatagtatgatgtgtaatttttttatgtgttagttgtgtagttgttaagtttttgagggttatgtgttgagtgaggtgtgtgagttggtggtgttgttggtgtgtggtagtgtggatggtgttttttttgatttgaggttgttgattgttgtggttgtggttaatgttatgagtgttgtgtgttttggttgttgttatagttatgatgattttgagttttgtgagttgtttagttataatgaagagtttgggtgtatggtgggtgtgggtagtttggtggatgtgatgttttggttgtagtatttttttaatttggtgtgtattgttttttgtgaatttgagtagtttaattgtaattttagtaattttattttggataagtttttgaggtattgtgaaagtttttggtttggggttgttttttgtgatatgatggatgtttttattttttttgtggaaaagaaggtggttggggatttgtatggtggtggtgtgtggttggatttggagaatgtattggttattattattgatatttttggtgttagttaggatattttgtttattgtgttgtagtggttgttttttttttttattaggtaaagtttttgggaggtgtgggttaggtttttttttttttgaaaaaggtggagtagagatagaatatgttgagtttgtaagtagggttttgggtttggggttttgttttaggtttttattttttaaaattaagattgtgttggtaaagggatttatagtgagggttgtgatatgtgtatgtgttttatttagtggtgttttgatttttttggttttttattttgtttttattgtttttttttttgtttgtgagtgagaatatatttgtaaagatttttttattttttggaaaaataagagtttttaaatgtttggagatgagttttgatatttttttttttggtgtattataattagaattggaatagttttgaaagaaaaggtaatgttataaatatgttaaatatagtagttttttttaggttagtttttggtgtgtatttgaggttgtttagttttggtgttaaaagtgggttgtttgttagggttttgttttaggttaaggaagtttatggaggttgggttagttgataggtaatttgtatagaaatttttagaaggtggttataattagtgggtagtgttaggtttataaaatttttgtgttaggagtttgagaaatgttggggtagaagataagaagtagttatttttatgaaagtagagtagtatttagaaaggtagatgggatatttaggaggtgtttgtagatgtttttggtttttgtgtttggtttagttagtggattttttgatgtttatgttggtttttattaagtatggatttaataggtttttggtgttgggttgttagatttggtaaaagaaaagtaagttttatatgggaatatttatattaaaagattagtttttgttgatttgaaatttatatttaattgggtggtttgtagtatttattgtggaaatattatttttaggggtaaatgttttgtaaggtaaattttgattgttgaagagattagaaattttggttttgtgttattttttggagtataagtgagtagttggagatgttgaatttgtaggtgttatagaaaggtgtttggaaggtagagaatgattttttttttattaaaatttattgtaatttatatttttttagatattgtatagttatttttataaattaaaagtttttgtatatttaaaatggttttttagtattaaaattatagaaatatttatggtgggtgagggagaggtagaaattgaataaagaaaagttaattagagattagggaaaaggaaattttggaataggttttataggtttttgtgtatttgtagataggtattttaatttttgaaatggtttttgttttttattagaattataatagttttttgagtattttaattaggtggtaaaaagaaataaaataatttggaggttatttttaatttaatatgttgatatttttttttttttttttagtgaaaagatgtatgatagggtttggtaaattatatgatttgtttttgtatatatgttttattgatgtagttatgtttatttatttatatattgttgatggttgtgtttattttataatataaggtagagtagagtagtgtaataaagagggtttggtttataaagtttaaaatagatattttttggttttttttattatatatgtttttatgaaaaaagttggtagatttttgtaatataatgttgaagaagtgattttaaaaataattttattttattatatatgtgtatatatttttttttggagttgtaaataattagttatttgttttttgatttttaatattttgatttaaggtagtggatatttttaattttttaatatttattttggtaatttttgatggttatatagtattttgttatgataatgtatagttatatataattatttattgaattttaatgttggttattggttttgattgtatttttaaaatttttattttaattttatgtatttatttattttagagatagggttttattattttatttaggttggttttaaatttttgggtttaagtagtttttttgttgttgtttggtaggtagttggggttataggtgtgtattattatgtttggttaatttttagaattttaggttttgttgtggttatatatttttgtattttttaaattattttttgaaaatatatttttaggtatggattattgggtttaaaatgaggtgggaagaggttatttttatgttttttgttttgtattaagattttgttttttaaaaagattgtattagtttgtattattaatagtgaataagtattatagtttgtattataattttatgaatattgggtatttgtttttaaatttaaaaaatatagtatgtagttttatttattaggatattaattatttttgtataaaatgagaatagtatgtttgttggaattgtttagggaaatgagggagaaaaaaaatttatttttatattgtaatttttgtgggttttgggtgtttttgtttttgtagattttttatattataaaaaaattaaaaattaaattttatgattattttgatataaagatgaatgtattaaaatgatgtatgaaaatatttttttttaattaaaagtgagtttttttaggtttgaagattgtaaaagatgtaaaaatatttttatgggtttttaaaaagtgttgtgagttttaggtattgtttttgtggtatttaatggaaaagttagttttatttattattgtgttttttgaggttgggaaaatttaagagttttttgatttataatgggaaagatagtattagttatgtaaggtttattataggaaatataatttttaaagtttattttgtaatttagtgagaaattaggaagttgttttagattttttttttagaaatattaatttagttattgagttagatagtttatttaagaaaaagtggaattaaaataaattataatgtgttttttagatgaaataagaattttgtttatttgtttttttttttttatattaaatattaaataggtattttgatgtgtagatttgagtgtaggtagaattggattaggttgtggggagggattgtttgttttgtatgggtgattagtttaatttgttttatgttttggtttttttttatgaagttatgtgtttttttagttttgtgtttgttattattttttatgttattattgttaatatttttgttttgggttattatatttttaaggatattgtggtttttgttaattagtggtttgtgaattatgatttagtgaagtggtttaatttggagaattttgatttagtttgatttttggataaggatggttttattaataaggatttgattagtagagtgatgatttttttagtgggtaaaaggtggtgtattggtgaagaattttttaagatgtagttttttttttttatttttattttggtttattagtgtgattttagggttaatttaaatgagtttgtgaaaatgaattttagttatggtttaattattaaatttaagttatttaaagttaatgttatttttagagagtttatggagttttttgatagtgttgtttaaaatttataagttaaggaaatttgttaataagaagtaagaggtaagttgaaattttagaaatatttatatttttggagatgaggagtaaaatttagtttttttttagttttttttttgtgttgttttttaattagtgtttaaggtgagtataaattaattgtttattaggtgaggtgtgttttatatttagtggttttttatgagtagtgggttatgtaggagtttttgggagatttttttgagttaaagatttaaagggtttaatgaattattatatatatattgtattttggttatttttgaaggtagtattttttggagttaaaatgtatatatagatatatatatttaaatatttatattaaattattgaatgaagtagtattttggtaattaggttatttttggtgggaatttaagattggttttttatatgtagaaatagataaaaagtatattaaataaagttttagagtatattgttgaagagatagagataagtaattttagtgtaaagtgtgtgattgaaggtgataagggaaaagataaagattagaaattttttttttatttttttaggaaaataatttagattttagtatttatgggtggatttatttttttgttttttggtatatttttttatttttaaggataaattataaagttagttgtttaaaaagaaattaatagttgaattagtgagtatagtggggttttatgagttattatgaattttaaagtatgtattattaaattgtaaaattttaaggtgatgttgtattttttttgtttgttaaagtatagaatttgaattattagtaaagaaaaaaaaaaaagttagttaagttttaaattatgtgattataatgtattgattttagtaagttttataggttaaaaaaaaaagttattaaatagtgtgaaatatattatttaattgtttgtaagtagtatattagtattattttgtttaggaaaaggttgaataatatatgttttgtataatattgaaaattgaaaagtataattaatgtaattaagtgtgttaaaaatgagtttgattaaattaattatttatttttgatatggaaatgaagtagggttttttttttttatttaaattttggtgaattttaaaattagattttaagatgtgtttttatttttataatatttttattgaaattttatttataatatagaattttgttttgaaaataatttaattaatatattaaaattttaaatttatggtatgtttaaattttaattaaattttaaagttattttgattattgagttttagttgaagttagtggaaatttgaatatttttttgtggaaggtagagaaatttaagttgtgtttgtttaatgaataatggaaaatgttatgaattatttggatgttttttttatgaggtgataagagttggggatagaatttttattataattgattaagttttttttttagatgattttttgaaagttaatattaatgtttgttttttggaaagttagaattagaagatagttttggaagttgtttggaaaagatagtggagatgaggttagttgtgttttttaagatggtaattattttggtagttgggaaagtataaagtttaaatgaaatgtatgtatttatatttagaaaagtgaattgaagttttaagttttaaagtttattgtaattaaatttttaaagaaagttttatagtgttttaagtgttaagtgtttattatattttattaagttttttggaatttttgtattaaaattttaaaaaagggagtttttgatagttgtgtgtatgtgtgtgtggggtggggggatggtaagagaaaagagagaaatattgaaaagaaggaaagatggttaaatatttttttatttattttgaattaattaatttggagtataaaatttaaagtatggatatttagaagaaagatgtttggtgtagtagagttaaattttaaataggttattaaaaaagtttataatatagtagatttgttttgtggtttggaatattaaaaaattttatgtaattttattttaaaattttatagttgtattttttgaatataaaaaattatgttagtatttttaaaggtattagagttaattatataaagtaggtttgtttagtatatttaaattttttggtatttgttattttaaaatattatgttttattaaggttgagatagtgaatttgggttgttgtagtttatttttttagattgagaaatgtgtagttgtaaaaataattatgaattaatttggatgttttattatgttaattaggtttagatgtgttataatttgtttttatgtatgtaggtttagttgttattagatgtttgtggtaaaaggaaagttgtgtttatatggaagaaagtaaggtgtttggagtttatttggtttatttaatatgtttataatttagttaaagaaaggaaaagaaaataaaaaatgaatgaaaataattgaatttggaggttggagtaattagattattgttttaattagaaatttttattgtgtttttattggagagagaatgtatttgttgataattattaaagttagaagttttattttaggttattgtaataaagtataatgtttattaaatgttttatttgtatgttaaagttttgattttataagtaaattgtttttttttaaaataaaaagatgttttaggtttgttttgtgaattttttaaaagtttttatgttttagaatttagtttttatttgtgaagtgttattatagttttaatatttttttagtagatttatattagattaaatagttgtatagtagtatatgttaatttgtgtgtttttagttgtgatataattgtgtgattaaaaggtatattttagtagatatttataatttaaggatatttttttatttaatttttttttatttttgtattttattatgaatgtttttagtgtgtgtataatagttatagtgtatagttgtagataaagtatattttggggaaataatatttatatgtagtttttattgtttgatatattaaattaaaaaaaaattgtattttattatttatattgggatattattattaaaataataaaaattatttttataattttgttatgaagttttatgttgtagtaaatatagtttaatgtattattttattttaattattattatggattatttaattaaaatattgtattgtaaatattttatttgtttattttatattttaggttgaggttatatgttttttttttttgtaggtttttattaattaaatttttaatttttatatttttgaatttttaagaattaatatggaggttatattttaattaaataattaagttaaatgagaattaatttgtaatgttgaaagattgaatagattgtgattttaagttgttgattgatttttgttttatttaaagaatgtagtatatattttttttttttagttttatattagttttttttttgagtattttttttttttatttttttaaaggtatatgtgttttaattagtgtaattaatgtttaataaaataagatgggtataagtattttgttatgtattatgtggaaatgttttattgttaatttttttatttggtaaaaatatttgattttatagggtttaggttatgattttttaggtttttattgtgttatatttatagatgatagggtttgtggtattaaaggttttttattttttagattatagtttttattaatg

SEQ ID NO: 119 - DNA, 4108 bp, Artificial Sequence
  chemically treated genomic DNA (Homo sapiens)
ttggttgtttatgttttaggttttttttttgtggtgttggtgaatttgttagttgttttgatgtatagtatgatgatggagattgatttgtatttgtttggtggtgtttaggtttttatgaattttttgggttttgttggggtgggtggtggtgggggtggaggtgggggtggtggtggtggtgggggtgttaaggttaattaggattgggttaaatggtttatgaatgtttttatggtgtggttttgtgggtagtggtgtaagatggtttaggagaattttaagatgtataatttggagattagtaagtgtttgggggttgagtggaaggttatgtttgaggttgagaagtggttgtttattgatgaggttaagtggttgtgtgtgttgtatatgaaggagtatttggattataagtattggttgtgttgtaagattaagatgttgtttaagaaggataagtatttgttggttggtgggtttttggtggttggtgtgggtggtggtggtgtggttgtggttatgggtgtgggtgtgggtgtgggtgtggtggttgtgggttagtgtttggagagtttaggtggtgtggtgggtggtggttatgtgtatgttaatggttgggttaatggtgtttattttggtttggtggtggtggtggtggtggttgtggttatgatgtaggaggtgtagttggtttatgggtagtatttgggtgtgggtggtgtgtatttgtatgtgtattttgtgtatttgtatttgtattatttgtatgtgtatttgtataatttgtagtttatgtattgttatgatatgggtgtgttgtagtatagttttatttttaatttgtagggttatatgagtgtgttgtttttgggttatggtggttttttttatggtgttgtggttgttgttgttgttgttgtgggtggtgtgtattagaatttggttgtggtggtggtggtggtggtggtggttgtgttgttgggtgttttgggtgtgttgggttttttggtgaagttggagtttagtggtagtttgtttgttttagtgtatttgtgggtgttgtgttttggggatttgtgtgagatgattagtatgtatttgtttgttggtgaggggggtgatttggtggtggtagtagtggttgtggtgtagagttggttgtatttgttgttgtagtattattagggtgtgggtgtgggtgtgaatggtatggtgtttttgatgtatatttagtgtttttgggatgttggggattttgtggtggtgatttatgagtttgtggtttgtgtttggtttttgttttgttttggtgtggtgtggtttttgtatagatgtttttatatttttgttaaaaggaaaatattggagatgaatgttgggtgatgtgtgttttttatttattttttttggagattttggtgattgttgggtgttgatattagatttgggttttagattgaattttggtgtttttttgagattttttgtatagtatttattatttatggaggaagtggaaagtgttttttttgtttgaggggataaaaaagttaaaatgaggtgagaggtgaagtttatttttgtatattggttggtgtgtttatttttttttgtgttgtttttggatggtgttgattgttggagtttaagtgatgtggagtttgttgtatttgttataaatgtagtaaggtaggtttaagtatttataagttttttgtagttgttattgtttttttgggttggtttgttaatttatataaagagattattattattatttttttttttagatggtggagttatattttgggttttgtaaaattttatgtatttgagtatttttatttttttttttgggttttgtattattttttgtaaatgtattgtgaaaaattttatttttggtgttgtaatgtggggaggagaagttagattatgtatatagttttttaaaaagttttttttttaaaaatgaaaaaagattttttatttaaaatgttttgagttaataaatttaagagatagagtttattttttttataaatttgtaatatgttatttttatgtgtatgttttatgagtttaaaatgtaatgaggaaatttgatagggaaattatttgtatgaattaaaagtaagggaattttggggaatgggaggataggattttttaaggaattttttttaatgaaagagaaggaagttaaaatttataggttattttgtagagttgagtgttaatatgggttgagaaataaaagtattttttgttttggttgttttattgtggatggttggggttgttgtgtgttattttgttgtaagtggggtgttttttatttggttgggggtttgtgttatagtttggtttagaggagggaggaggaagggaagattttagtggtgggattttggattaggttatggatgaaggataaagattagggtaggttatgggttttttaattttttagtaattaagattttgagtagaatttatttaaatgtgttttaaggaaatataattgttgaattaaaatgtattgtagttgagttttttttgtttattttttgtttttttttttggttttttttttttgggaaaatgggtaaaataattgtgttggatttttatatatatagaaatattgattattatttttttttgtgtgaattgggatgtaagttgttaattgatgtgaatgtaaaatgttttgtttattatttttgatgagattttgaggttgtttgatgttttaaattttttaattatattattttttaggtgtttattggtatattgtagttttttttttgaaatttaaaaatttttgtaaaattttgtttttaagtaatttgatagtattaaatattgtatttaaaaattatattgtagtaaatatatttaaaaattaattataatgttaagatgaaattatatttttggaaaaaaaaaatatttgaagtttagatggaaatatgtttattttagtagttttaggtttttttttgtttttttaatatttttttttgttttggagtatggattgtttgtttaaaagtgagtttatgttataagtttaatgagaattgaatttagtttgtatttgagaatagttttaagtataatgttgatttgataattgatgtgtaatttgggaagttattttgataattttgtttaaattatttatttgttaaagtgattataaaaaagtttaagaatgatgtttattgttttttaataagataataaatttttttttttttttttttttttttatttttattttttttagttatttgattttttttgaagtagttgtttttggaagagtttgtgtgtttatggatggttgagtattattatgatttagtttgggataagggtttttttagttttttttgggagatgatttgggaaattttataatgtttgttttgttaatttattgggattttgagggtttaatgggattttgagggttttttttgaaatatataaatttaaaggattttttttgaggttttttgattgatgtttatttttagtttggtttttgtgtttttttgtgtgtattttggagtttttgtgtttaattgttggtatttaggttttggtttaagattaggatgtgggttttattttagaggtatagattatgaaaagttgagttagtgtgtttgggatgttaggtaagtagtttttatagtttggtattttattgtaggtgttttgtgtatagttagttgaaatagttaatgttaggtgttttaattattttatttttttgttttgttgattagaataatatagaaaaaagtaaatataaatttttaatgattttatttaaaaatattatagggtgggggtaaggaaattagttgagatttattttaggattgagattttatttttttttttttgtttttagtagtgttgttttaatttaaattagtggagaaaagattatagtaggttttgagttgattgtgaatttggtgtttggttaaggtaatatttattgtatttatggagtgaaatattatatgatgatagttattatattatatgatgattttatttattttttaaattatagggt

SEQ ID NO: 120 - DNA, 4108 bp, Artificial Sequence
  chemically treated genomic DNA (Homo sapiens)
attttgtgatttgggaagtgaatgaagttgttatataatataataattattattatatagtattttattttgtgaatatgatgagtgttattttggttaagtattgaatttatagttggtttagggtttattgtaattttttttttattaatttgaattggagtgatattgttgggggtggggaaggggggatagaattttaattttgagatgaattttagttaatttttttgtttttattttgtgatatttttaaatggagttattaaaaatttatatttgtttttttttgtgttgttttaattaataaaataaggaaataaggtggttggagtatttggtattggttattttagttgattgtgtatgaagtatttgtaataagatgttaaattgtaaaagttgtttgtttggtgttttgggtgtattaatttagttttttatagtttgtgtttttaaagtggggtttatattttaattttgagttaagatttagatgttaataattggatatagaaattttagggtatatataggggagtataggggttagattgagagtggatgttagttaaagaattttagagagagttttttaagtttgtatattttagagaaaatttttaaggttttattggatttttaaggttttggtgagttaatagaataagtattataaaattttttaaattattttttggagaggattggggaggtttttattttggattaagttgtagtggtgtttagttatttatgggtgtatagatttttttagaaataattgttttagaaaggattaaatagttaaaagaaataaaaataaagaaaaagaaaagagggggggggtttattattttgttagaaagtagtggatattatttttgaatttttttgtaattattttaatgaatgagtggtttaagtaaaattattaaaatgattttttaaattatatgttaattgttagattagtattatatttaaagttatttttgaatgtaggttgaatttggtttttattaaatttatagtataggtttatttttggatggatagtttatattttaggataaggaagggtgttgagaaagtgaggggaaatttaaggttgttgaaataaatgtatttttatttgggttttaagtgttttttttttttaaaaatataattttattttaatgttgtgattaatttttaaatgtatttgttatagtataatttttaaatgtaatatttaatgttgttagattatttgaagataaagttttatagaaatttttaaattttaaaaaaaaaattgtaatgtattaataaatatttagaaaataatataattaaaaaatttaaagtattaaataattttaagattttgttaggaataatgaataaggtattttgtgtttatattggttagtaatttgtattttagtttatgtgggggagggtgatggttgatatttttgtgtgtgtgagaatttagtataattattttgtttgtttttttaagagaaagaagttagggggaggggtagaggatggatggagggggtttggttgtagtatgttttggtttagtgattgtgtttttttgaaatatatttagataaattttgtttgaaattttaattgttggggaattgggaaatttgtgatttgttttggtttttgttttttatttatggtttggtttagggttttattattggggttttttttttttttttttttttttggattaaattgtggtgtagatttttagttaggtggaaggtgttttgtttgtagtaaggtaatgtgtagtagttttagttgtttgtagtgaaatagttggagtagaagatatttttattttttggtttgtattaatatttagttttataaaataatttataggttttaattttttttttttttattgaaaaaggttttttgaaaaattttgtttttttattttttggggtttttttatttttagtttatatagataatttttttgttagatttttttattgtattttgaatttataaaatatgtatataaaaatagtatgttataaatttatggagaaaatgggttttgttttttaaatttgttgatttgaaatattttgggtggggggtttttttttgtttttagaagaaaggttttttagaaaattatgtatataatttgattttttttttttgtattgtaatgttgaaaataaaattttttataatgtatttataagaaataatataaaatttaaaaaaaaaaatggaaatgtttagatatataaagttttataaaatttagaatataattttgttgtttgaaggagggggtggtggtggtaatttttttgtataaattaataaattaatttaaaagagtggtaataattataaaaaatttgtaagtgtttggatttgttttattatatttataataaatgtgatgagttttgtgttatttgggttttggtggttggtgttgtttggaagtaatgtggaggaaagtgagtgtgttggttggtatataaaagtgggttttgttttttgttttgttttgatttttttgtttttttgagtaaagaaaatgttttttgttttttttgtaggtgataaatattgtataaaaagttttaagaaaatattgaagtttagtttaaaatttaagtttggtgttagtgtttggtggttgttagggtttttggggaaggtgagtgggggatatgtgttatttggtgtttgtttttagtattttttttttgataagaatgtgggaatgtttgtataaaagttatgttgtgttggggtggggtgggagttgggtgtgggttgtgagtttgtgggttgttgttgtagagtttttggtgttttgaaggtgttagatgtgtgttaggggtattgtgttgtttatgtttgtgtttgtgttttggtagtgttgtggtagtgagtgtagttggttttgtgttgtggttgttgttgttgttgttgggttgttttttttgttggtgggtaagtatatgttgattattttgtgtaggtttttggggtatggtgtttgtgagtgtgttggggtgggtgggttgttgttgggttttgattttattagagagtttagtgtgtttagggtgtttgatgatgtggttgttgttgttgttgttgttgttatggttgagttttggtgtgtgttgtttgtagtggtggtggtggtggttgtggtgttgtaggggaggttgttgtagtttgagggtgatgtgtttatgtagttttgtgagttggagatggggttgtattgtagtgtgtttatgttgtagtggtgtatgggttgtgggttgtgtgggtgtgtgtgtgggtggtgtgggtgtgggtgtgtggggtgtgtgtgtgggtgtgtgttgtttgtgtttgggtgttgtttgtaggttagttgtgttttttgtattatggttgtggttgttgttgttgttgttattgagttggggtaggtgttgttggtttagttgttgatgtgtgtgtagttgttgtttgttgtgttgtttgggttttttaggtgttggtttatggttgttgtgtttatgtttatgtttatgtttatggttatagttgtgttgttgttatttgtgttggttgttaggagtttgttggttagtgagtatttgttttttttgagtagtgttttggttttgtggtgtggttggtatttgtaatttgggtgtttttttatgtgtagtgtgtgtagttgtttggttttgttgatgaatggttgttttttggttttggatatgattttttatttggtttttaggtgtttgttgatttttgagttgtgtattttggggtttttttgggttattttgtgttgttgtttgtgggattatattatgaaggtgtttatgggttgtttgatttggttttggttggttttggtgtttttgttgttgttgttgtttttgtttttgtttttgttgttgtttgttttggtggggtttgagaggtttgtgggggtttgggtgttgttgggtgagtgtaggttggtttttattattatgttgtatattggggtggttggtgggtttattggtattgtgaggagagggtttggagtatagatggttgg
